United States Patent Application Publication US 2022/0008368 A1 - sequence listing, part 11

SEQ ID NO: 2 - DNA, 58617616 bp, Homo sapiens (residues 21,710,231-23,881,253 of 58,617,616)
  modified_base (1)..(60000): a, c, t, g, unknown or other
  modified_base (24448981)..(24498980): a, c, t, g, unknown or other
  modified_base (24552653)..(24552752): a, c, t, g, unknown or other
  modified_base (24891257)..(24891356): a, c, t, g, unknown or other
  modified_base (24895791)..(24895890): a, c, t, g, unknown or other
  modified_base (24898314)..(24904771): a, c, t, g, unknown or other
  modified_base (24908590)..(24908689): a, c, t, g, unknown or other
  modified_base (27190875)..(27240874): a, c, t, g, unknown or other
  modified_base (58607617)..(58617616): a, c, t, g, unknown or other
acttgttctatgttcttataattttgaaaatacagttgacacttgcatgacttatgaagtttttgatagtctaatgtcacttgatgttccaagaacagtatattttaaattaagaagaataaactgtatttgttttatatatttaaggcttacagtcacaaatttgaaaacttcaaagtctggttttccatctattcatacataaaacagtgtagcgtgctgaaacatttgtttttttaaagtggcagccacagttcctgtctgtctggatatattttaaacttttgtgtgttaagcttaacataagagacttcattttgttttaggtaacctaagattgttgtacccccccccccaaaaaacttcacagattactgtagggttcagcaaactgtttatataatctaacattagtatctctattttctaatgtctagattttttttagaaaagattgttttgtttttatttttgttttacaaatgtctccacaaattctggcttattttataaaataacagaatactaaagaaatgggtgctttgccatactatgtggacactggcactcaatgtccaatgcccacattggatatttggataaaataccaaatatccaaatattttaatcaaaatttagtaagtttaaataatttgattttttcactacagtgatagacattcacaaatatttcatatattaaagctatcagtgttaggttttacttagtagtaatatatatataagatcaagaatctatttaaaatggatatctttcatcaataatttggtgctttcaaatacccagaagtcttgttttaatcatattaagtctgagaataatttactaatttcatttttggaataatgtgttcaaaatgttctagtttaacctagtgttgattgatgatgggtaaacaaatcaatttttttcaaatctcataggtatattatgttattgaagatgttttcaattaaaattctccctttcaatattgtttacaggaatgtaggtctagtccaatctgctcaacctgttaatcagtgtcagctgccagattccaattcgtttttagtgtgcctgtacttttctttccataacctctgaattcatttctattacttatttaaatgttatataataaagctcatatatttaaaacaaaaccagcaggtaaaatgagttctggcttagaataaagaagctgttaccgagttacatatacagatgcatgcagctcaacaaaattttagacaaaaagtattggactgaactataacatgtgttgctatgactaaggctctaatgaccttaagaataaagacaaatttcagcaaatttatccagttgctttcagtacatgtaaaggtagtacatcaagaattctcatgctactgcctgagaaaacagattctactgttacctaataaatcaaaatcaactggatggcgtttctataaccttgcaccaggtaaagaaaaactgcaatggaggactaattaacgcagactccatcataaggaaaagggtaatccagaatgtcactttcaatatttaagtatttaaatttttagttgaaaatgtggtgaaatagtgcttttggtaagctttgtgtagttgaacatcagcattaagtagaaaaaaatctttaaaaatgtaaacaaacaaaaccatacaccaaaaaaactaacttgaccagtgtgtacatattgatctttgtgttggtagagtctaaagcagaacatttggtgaacttgatacaattattttgatcacattggcataccaataaaatcacttatattgggtcaggtgcggtggctcacacctgtgatcccagcactttgggaggccaaggttgggcggatcatgaggtcaggagtttgagaccagcctgaccaacatagtgaaacaccgtctctactaaaaatacaaagattagttgggtgtggtggtgcacacctgtaatcccagctactcaggagtgagggtgaggcaggagaatcccttgaacccaggaggtggaggttgcagtgagccaagatcctgccactgcactccagcctgggtggcagagcgagactccatcttaaaaaaaaattatttatattcagtttgaataaaacattttcacatcttaaaaatactgctttgtacttagtatgaacaataaatgtaaagtctttatcctcaaacggattctgattgtcaactcaatacatatggcaacccatttctctggtttatccaaactgaagtcttgtgaaggctcaaatatagaatgagagggactcaacaacagagcatgagaagcaagaaggatggggtaggatgatcagccctaaggctcagggattcctggggaccccaatataatgacatcaactatgaagcttactaactgaaaataagcataagcagctgaaaactccatggcttgctttggtgggaaggagtctctggaattagagtcatgccaaaaggattgagccagaatgacacgtctctaaggattattaggggggactgttcataagcacataaacatttgttccaaatcttattacagtagcaatatccttttctgtaatatcagcttccccaacgtacggttgccatagacaaactaagacaagtgcctaatatgttgtaggcaattagtttctaaatttaaaaaacttgcaataattttatgaatttcattaaactctgtttcatgtataaatctcactgaaaggcagtatccagtagctattttccttagtcctttctgggattttctgttgcttgattccaaaccaaccttaatttaatcctagtcatttctaaatccccagatggaataacagaaagacagcagaaatgaacccaagttaccccaaacagtcaacatctaacatattttgttccccaaatgaacaaaaaatcacacaagctaaaaaacagtgggtttaaaatttaacccaaatttaacagtagcagttttaccatatgtaaaaattagcaaagtcataacttagatacccatagtccgttattctagaaaaaattaatacaattatgacttttttagaaaagaataaatatgacaaaatatacccgctcatatctttgaaatatgaatgattttttcttttaatatttaatacttagacaagtattatagctatcattcatgaattaaagtagccttaggggaaatagtgttttatattaataatgaagattgaagctccagggatgtcaaataatttctcttggatacacagctagtgacccaacaagctcaaatatgtttgatttaaaaattttgacttttccactgttgacattgttgacataacagctaaatctgagtctcagggttgataatttagaataaatcaagacaagtactattgaggcaggctaggtagtcaagaaagtgacgatgtcctcgggatgcagcaaccacagcaattgcatgctgactgcatattgtcaacacgataagccccagcatttacactgtatttcagccattcaagcaaagctctcttcagtagggaaattcccctgtagagaacatgcacattttgattttacttgtcctctaactgaccttttactcattataatagtaaaaaataaacacgtgtgtgaagatttaagatgttaatgagatatgtgacatataagcatgtacagccactgtgtctgtgcaccaaaaggaccacccagaacatgcttactaacacctcttcccgtctccttgtaaataattacgtaagactcccataactgagtctccctagttccagtctttgctgtctcattcttacagcagcctgccctgaattcctcctctctcagcgagtactggctattctttacctaacttttaaaatagtatttctactttgcaataaatcactctatgctgcatcttcattgttttgtgtctcttgtttaaattttttgaaagtgagaagaatcgaggtctcacacagccatcaacactatcatgctttgttttgtattctttattatttctttctctgatatgtcaccattcatattttaaacccagacaacgctgctaaattaaaaatttaaataatcacaaaatgatttgtcataaaagcatgtatatggctgggtgcggtggctcacgcctgtaatcccagcactttgggaggccaaggcgggcagatcacctgaggtcaggagtttgagaccagcctgaccaacatggagaaaccccatctctactaaaaatacaaaattagccaggtgtagtggcgtatgcctgtaatcccagctactcaggaggctgaggcaggagaattgtttgaacccaagaggcggagcttgtggcgagcctagattgtgccattgcactccagcctgggcaataagagcgaaagtccatctaaaaaaaaaaaaacagttaaaatgcctttgaagagtgaaaataaaggatagattaagcagagaatttgacatggaaaaaggctggtcaattgtttgaaaattacattgcggctgggtgcagtggcttatgcttgtaatcccagcactttgagaggtcgaggcaggcacatcacctaaggtcaggagttgaagaccagcctggccaacatggcaaaaccctgtctctactaaaaatataaaatttagctgggtgtggtggtgggcacctgtaatcccagctattcgggaggctgggtgcgtggcaggtgtgtgacaccatgactagctaattttttttaattttattttttgtattttcagtagagatgagtttccaccatgttggccaggctggtcttgaactcctgacctcaagtgatccgcccatctcagcctcccaaagtgttgggattataggcgtgagccaccatgcccagcatattttttccaaattttctagtttgcatgcatagaggtgttcatagtagtctctgacaattttttgcatttatgtaggattagttgtgatttcacatctctaatatttaaatagatgcagagaacaacagaaaaaaaaaacagatgcagaataaaagtttgacaaaagttgacattcccttatgataaatctctgaaaaatttaggtatagaacaaatgcacctcagccaataaatgccacatataaccaaaaaaatgcacagctaacaacatactaaacggggatatattgtaaacttttactctaaaagctaaaacaagacaaggatgcccactctaatcagtcttactaaacatagtactaaatgcccatgacaaagaaattagagaataaaatcaaagacatccaggttaagaagaaattacattatccctatataattatcttttatctctgtacataatctgaagtatagaacagccgaagattttactgaaaaatattaaaataaacacatttattaaactttcagaatacaaaagcaacatccaaaagtcagtagcatttatgtacactaacaaatatctcaaaatgaaattaaaaaataattccatctacaaaaactgtagtaactatattttgaaaaaaacttaaccaaaaagttgaaacaccttatattatactgtaaacagcattacataaattgagtaatgcgcaaatgaaatactactcatttatgaattgcattaataaatttctatatcacacaaattgatctacagatataatgcaacccctatcaaaataccagtggcatactgcatagaaaatttaatttatatggtaccacaaaagaccctgaatagccaaagcaatcaagaaaaaaaagtaaaggtattaccataccttcaaaatattctacaaggcaatagtaactaaaacagtatggtacttgaataaaaacagacacataggccaatgcagtagaaaaaaagagaccagaaatatatccatgtatttacagctaagtgatttggaataaagctgacaatttctttttttatttttgagatggactcttgttctgttgctaggctggagtgcagtggcacgatctcggctcactgcaacctctgccatctgggttcaggtgattcccctgcctcagcctcctgagtagctgggactacaggcgcgtgccaccacacctggctacttttttgtattttattagagatggggcttcaccatgttggccaagatggtctcgatctcctgacctcatgatccaccctccttagccttccaaagggctgggattacaggcatgagccaaaagaacagtaacttcaataaatgatgttgagaaaactttatgtccacaggcagagaaataaaatgagaccctcatctcacaccgtatataaaaaccatttcaaaataaattagacgcttaaatgtaaggcttgagatgagcctggtggctcacacctgtaatcctaccactttgggaggtggaggcaggcagattacctgaggtcagttgttccagaccagcctggccaaggtagtggaaccccatttctactaaatatacaaaattagctcggtgtggttgcaggcgcctgtaatcccagctattcgggaggctgaggcagaagaatcacttgaacccgggaggtgaaggttgcagtgagctgagatcgtgcaccattgcactccagcctgggcagcaagagtgacactccatctcaaaagtaataataacaaataaatgtaaggcctgaaactctgaaactgctacagaaaaatagaatgaaagccccttagactgttctgggcagtaagttggttttttgtttatttttttttttgagacggagtctcactcggtcacccagcctggagtgcagtggcatgatctcggctcattgcaacctctgcctcccgagttcaagtgattcttctgcctcagcatcccaagtagctgggattacaggcacccaccaccacacccggctaatttttgtatttttagtagagatggggtttcaccatgttggccaggctggtcttgaactcctgacctcaggtgatccacccacctcagcctctcaaagtgctgggattacagacgtgaaccaccgtgtctggtcagtttttttttttttttttatttaacctcaaaatcttaggaaataaaaggaaaaatagatgagtcagatgacttcatattaaaaagctgctgcacagaatctgatacaatcaacaggatgagacaactaaaaaaatgaaagaaaatattcgcaaattacatgtgacaaggagttaataccaaaagtatgtaagaaactttgctgggtgcggtggctcacacttgtaatcccagcatttggggaggctgaggtgggcagatcacctgaggtcaggagttccagaccagcctggccaacatggtgaaaccccgtctctactaaaaatacaaaaattagccaggcgtggtggcacgtgactgtaatcccagatactagggagcctgaggcaagagaattgcttgaacccaggaggtggaggttgtagtgagctgtgatcataccactgcactccagctggggcgacagagcaagagtcagtctcaaagaaaaaaaactacatatatatgtatatatatatatataaataaatatatgtataatatatatgaaactcaattaactatacaacaaaaacaagtaactcttaaaatgagcaaaaggcttaaataattttcaagaaaagacatacttatggccaacagatatatttaaatatgcccagtgttaagtacgatcagggaaaggcaagccaaaaacaactatgagatatcaattcactcctgttagaatgactcttattaaaatgaaaaagaaaaaaatgttatgaaagatgagaaggcattgcgtggacactgttggtttgaatgtaaatgaagacggccgttaggaaaacaaaatagagatttctcaaaaaacttaaaatcaaactaccatgtaatacagctgttgcactattgggtatatttccaaaacaaatgaaatcagaatgaagaaacacttacacttctatgttgtttgcagcactcttcacaatagccaaaatatagaatcaacagttcaggctgggtgtggtggctcacacctgtaattccagcactttgggaggacaaggcaggcggatcacttggggtcataagttcgagaccagactggccaacatggcgaaaccctgtctctactaaaaatataaaaattagccaggcatggtgacgggcacctgtaatcccagccactctggaggctgagttgggagaatcacttaaacccaggaggtggaggttgcagtgagccaggattgctccactgcactccagccagggtgacaagagtgagacttcataaaaaaaaaaaaaaaaaaaatcaacagttcagcatctaatgagtaaagaaagacaatgtggtagatatatacagtggaatactatttaaaaaagaatttttttgagaccaagtctctgtctatacaatctcggctcactgcaacctccacatccctggttcaagggattctcatgcctcagcatccagagtagctgagattacaggtgtgcaccaccatgcccagttaattttttgttgtatttttagtaaagatggggtttcttcatgttgcccaggctggtttcaaactcctgggctcatgcaatgcaccttggccttccagaatgctgggattacaggtgtgagccaccacacctggcctttaaaaaaaaattcattatttttaatcacatggattaagctggagaacattaattgagataaggttaatagttcatgatttcacttacacatggattccaaaaaacataacctcattgatgtaaaatggtgaccatcagaggccaatgtatttagaatgggctgggcacggtggctcacgcctgtaatcccccagcactttgggaggctcatcacgaggtcaggaggagaccatcctggccaatatagtgaaatcccgtctttactaaaaacacaaaaattagctgagtgtggtggcacatgcctgtaatcccagctacttgggaggctgaggcaggagaatcacttgaactggggaggcagagattgcagtgagccaagattgtgtcactacactccagctggtgacagagtgagactgtctcaaaaaagaaaaagaaaaaagagggttggaatgatatctgtcaaataatacatagagttgaatagaagaaataagttcaagagatttttttgtacagcatggtgactatagctcatgtttttgtatttttgaaaagtggtaagacaatgtcatgtggtctcaccacaaaaacgttaactatgtgaagtattagttacctagaactaatcacctgacaatgtatatacacttcaaaatattatgttctacagaaaaagtacacattttatctgtcaagttaagtttttaaagctttatagaaggataacaatgtgtcaaatactgtccatgtttttgtcataatcttggttgaatagtatcaaaatatatagtttttgtttttggttgaatagtatcaagatatatagtttttgtgtttttatcatttaatttgtcagtcataaccgtaggaactccgatatttaacagtatgttctggacccagcacattgcatggaagaagcttatgtcctttaggatttttactttaagctccgggcacctggagtttctggtgctgatggtaatggtatgaaagacactcaaagagcaggtgttgcttatggtcccatgactggccactctgtgaacacagtaaactagtttgcatgcaaagtaacagaaaatgttttaatccaaatgctgtcatgatgcccaaaatttatccagaaaaaatgactaaggagttgcctgcatttcagggacagaaaataaaaactgtagactaaacttcacccacttaaaaaattatatgagaaattcctccaaattgtaatatcaatatggaaaagcaatattcttttaagtttcaaattcacagagctcattattttgtagcctttagcattcacttaaaaattatatgtgttatcctcccgtctccctctccctctcccgtctccctctccctctcccgtctccctctccctctcccgtctccctctccctctcccgtctccctctccctctcccgtctccctctccctctcccgtctccctctccctctcatgccgagccaaagctggacggtactgctgccatctcggctcactgcaacctccctgcctgattctcctgcctcagcctgccgagtgcctgcgattgcaggcgcgcgccgccacgcctgactggttttcgtttttttttggtggagatggggtttcgctgtgttggccgggctggtctccagctcctaaccgcgagtgatccgccagcctcggcctcccgaggtgccgggattgcagatggagtctcgttcactcagtgctcaatggtgcccaggctggagtgcagtggcgtgatctcggctcgctacaaccacctcccagccgcctgccttggcctcccaaagagccgagattgcagcctctgcccggccgccaccccgtctgggaagtgaggagcgtctctgcttggccacccatcgtctgggatatgaggagcccctctgcctggctgcccagtgtggaaagtgaggagcgtctctgcccggccgccatcccatctaggaagcgagaagcgcctcttccccgccgccatcccatctaggaagtgaggagcgtctctgcccggccgcccatcgtctgagatgtggggagcacctctgccccaccgccctgtctgggatgtgaggagcgcctctgctgggccgcaaccctgtctgggaggtgaggagtgtctctgcccggccgctccgtctgagaagtgaggaaaccctctgcctggcaaccgccccgtctgagaagtgaggagcccctccgtctggcaaccaccccgtctgggaagtgaggagcgtctccgcccggcagccaccccgtccgggagggaggtggggggggtcagccccccgcccggccagccgccccgtccgggaggtgaggggctcctctgcccggccgcccctactgggaagtgaggagcccctctgcccggccagtcgccccgtccgggagggaggcgggggggggggggtcggccagccgccccggccgggaggtgaggggctcctctgcccggccgcccctactgggaagtgaggagcccctctgcccggccagtcgccccgtccaggagggaggtgggggggtcaaccccccgcccggccagccgcccagtccgggagggaggtggagggtcagccccccgcctggccagccgccccgtccgggaggtgaggggcgcctctgcccggccgcccctactgggaagtgaggagcccctctgcccggccagccgccccgcccaggagggaggtgggggggtcagccccccgcctggccagccgccccatccgggagggaggtgggggggtcagccccccacccggccagccgccccgtccaggaggggggagggggggtcagccccccgcccggccagccgccccgtccgggagggaggtggggggggtcagccccccgcccggccagccgccccgtccgggagggaggtggggggatcagccccctgcctggccagccgccccgtccgggaggtgaggggcgcctctgcccggccgcccctactgggaagtgaggacccctctgcccggccagccgccccgtccgggagggaggtggggggaacagccccccccccggccagccgccctatccaggaggtgaggggcgcctctgcctggccgcccctactgggaagtgaggagcccctctgcctggccagccgccccgtccgggagggcggtgggggggtcagccccccgcccggccagccgccccatctgggaggtgaggggcacttctgccgggccgcccctactgggaagtgaggagcccctctgcccggccacgaccccgtctgggaggtgtgcccagcggctcattggggatgggccatgatgacaatggcggttttgtggaatagaaaggcgggaagggtggggaaaaaattgagaaatcggatggttgccgggtctgtgtggatagaagtagacatgggagacattttgttctgtactaagaaaaattcttctgccttgggatcctgttgatctgtgaccttatccccaaccctgtgctctctgaaacatgtgctgtgtccactcagggttaaatggattaagggcggtgcaagatgtgctttgttaaacagatgcttgaaggcagcatgctcgttaagagtcatcaccactccctaatcttaagtacccagggacacaaacactgcggaaggccgcagggtcctctgcctaggaaaaccagagacctttgttcacttgtttatctgctgaccttccctccactattgtcctatgaccctgccaaatccccctctgcgagaaacacccaagaatgatcaataaaaataaaaaaaaaaaaaaaaaaaaaaaattattattaaatgtgagaaaaaaaaaaattatgttatacttttattatataagtatatattttaataaaagtatgttacataataaaaaataaatttaaaattgttcacttaccattaactcttaaaaatttaatttctacattttcttgcaaattttatgtttgccacactttaagaatctaattttttttttaacaaagaacaactattctgatttaatcttctcacctgtggacaatgtatgcttttatcttaactaatccgaaagttatattgataaccaaactctccagttaaaaacaattattcagtgcattaaaaaataccaactttcagctgggtgcagtggcttatgcctgtaatccaagcactttgggaggctgaggcaggtggatcatatgaggtcaggagtttgaaaccagcctggccaacatggtgaaacttcgtctctacaaaaaattaaaaaaaaaaaaattcagccagatgtggtggcaggtgcctgtaatcccagctacttgggaggctgaggcaggataattgcttgaacctggaaggcagaggttgcagtgagcccacattgcaccactgcactccagcttgggcaacaagagtgagactctgtctcaaaaaaaaaaaaaaaaaaaaaaacaaccaactttctcgtcaaaatttacaaagtaccatgtgaaatgaaatggcattaagacaacagtgagaaaactgaagccataacacagaaaaaggagatgggctgtgctgcatacatagctggggatacacataataaatacagagaaatctgaagataattaagaaataaaagatgcagaacttctctttaaattcagcaagattcagcattgcagcctggaaactatgtcctctccacatgaagaatcaattttatttcttcaccactgatgttttccatctctgaactgaagttacaagctaactttagcaggaatacttatggcttactatggagcatctgttacacagcaagaactgtcatgtatgtttgctacatttaaatataaaaacatcctcacgacttataaagcttccctagtacttacctgaacaaattgactcaataaataaatttacttatgtcaactataaaaagtgaaaagaaaaataactaaagggctatagagttctccaactaaaaacaaaatgaagtgttctaactaaataaaatgtaacttaatacactaattgtggaattacatttaaaaattttgtatgcactaaattttgtaaaaattattcttataatcacagaccagctcacataatgaatacttcataatctgtaaaatatttatatgaaaaaagatacaaaataattaggggtctatcatgagtaccaggcaagtataaacagaattttcatggggagattcagaactataagccacagaatgtacagtaataaattcaatacaaagcagagaatacattttcttttagcatttttgaggcttttagttttctagtagtcatcttgttaaaatgatttgttttgttcagtattgcttttttcttcggaaaacaggtacaaattcatacacacaaactcactctataattttcttacacttaaggtttatctttagactaacatatatttaactatatgtaaatcaaaactaaatgtctgcatgtgtttgcaggcagacaggaaacatgctcaaaaaataaatattagaaaactttaaaaatacttattcaggcctcagaaatgtagggattttattatacttctacataacttttattatgaccataaaaataacactgtaatcaataacaatttaattttacattttaaaataactaaaagtataaaactgggttgcttgtaatacaaaggataaatactagaggtgatggatacctcatttaccctgatgtgattattatatactgtattcttgtatcaaaatatgccatatattgcatgaatatatactcatattatgtaccccaaataattaagaaaaataaatttaaataaaataaacatttggctgggcacggtggctcatgcctgtaatcccagaactttgggaagccgaggcaggcaaatcatttaaggtcaggagttcgagaccagcttgacttacattatgaaaccctgtctctactaaaatacaaaaattagctgggcatggtggtgggtgcctgtaatcccagctacttaggaggctgaggcaggagaattgcgtgaacccaggaggtggaggttacagtgagccgagatcgtgccactgcactccagcctgggtgacagagcaagactacctctcaaaaataaaataaaataaaaacaaaaatttaacctacagaaataatattctttaacttatttgcagtcaaagccactagcaaaagagattactagagatgttaatccattatgttaccaaatagtatactgttaccatgttttacgtacacccttgagtaaggtggaataggttaatgtctgtggcataataacacttcactgaatgcacaatagtatttaacatgttaaaaaggttgaatatattaacatcacatataatctgaaatttaaaaaatatactgcattttatataaaagtattagtaaaatatactaattttaatttacttataaatgaaattaagttttctcataatgcagaatattactctgaatgcctaacgcacacattgcttaatattataagttaaccataaaagtctcttcacttagattttcatcatacatctcatattttaatgtctttttcatagcaaagtttataaataatgctcacctaataaaaaagaatctctcatatctgatgcagcaacaattgatcacatgctttcacatgtaaataggagtgaagaaaaggcaggaaataatttaagagttgaattacattattactcacttttcaaaaaatctaattttttcaaaaagttaagcatactttgaatgcaataactgcaaaaaatttctacttttaaagttatatacaaatattttaccaattttagttttagattattttctatactcagcactctgatttagtaaaatacctgaagcatcagtgccttacatatttctactgtaaattctctgatatttacagacttaatgattaaaatttttaaaaaatttttcctgtatctgcaaaaatatgttttagtatgaactctctggtgttttctaagctgtagtttttgaaaaagtatttttccaactttattacattcgcacagtttttttcaatataaattccctgatattgaacaaagtttgagcaactgcttcagaggtttcctctaatacaaaacgtgtacagtaagatctgtgatacaagtaaacatattacaattctactacaatgttcttcttcaaaatactcttcactttaaaagcttatattttcttaaagatattttgacagtagttgcacttatgtttttattgagtatgaactctctgatgttgagtaagatgtgagcatgtattaatggctttttcacagtctttatatttgtacaatatttctcaagtataaatgctttcctgtgaaggtgtgagcattagttaaaagttttgtcacactgttcacacatgtagaagttttctccagtataacttaccttacctacaatcaagtgtgacaaccatttaaaactttatcacattcttcacatttctaggatttctcaacactatgatttatgttttgaaaagtttgaggtgttttcaaagcactgtcacatctttctggtttgtagaatttctctctagtatgaattatcttatgtctgttaggaattgagaatttattaaaggctttgccatattcttcacagtcacaggagttccctccagtatgaatttttttatgtttagtaagagttgaggactggtaaaaggctttgccacatttttcacatttgtagggtttctctccagtatgagttattttgtttaataaggcttagggactggttaaagtctttaccacattcttcccatttgtaagatttctctccagtatgagttatcttatgtttagtaagggttgaggatcggttaaaagctttgccacattcctcacatttgtagggtttctctccagtatgaatcatcttatgtgcagttagttgtgaggaccggttaaaggctttgccacattcgtcacatttgtagggtttctctccagtatgaatcatcttatgggtagtaaggtttgaggactcattaaaagctttgccacattcttcacatttgtagggtttctctccagtatgaattctcttatgtttagtgagggctgaggaccagttaaagcctttgccgcattcttcacatttgtagaatttctctccagtatgacttgtcttatgtttagtaaggtatgagaatcggtaaaaagctttgccacattcttcacatttgtaaggtttctctccagcatgagttatcttatgtgtagtaagggttgaggactggttaaaggctttgccacattcttcacatttgtagggtttctctccagtatgaattatcctgtgtgtagtaaggtgtgaggaccggttaaaagctttgccacattctgtacatttgtagggtttcactccagtatgaattcttttatgtgtagtaaggtgtgaagaccggttaaaagctttcccacattcttcacatctgtatggtttctctccagtatgaattatcttatgtgtagtaaggtgtgaggaccggttaaatgctttcccacattcttcacatttgtagggtttctctccagtatgaattctcctgtgtgtagtaagggttgagaaccagttgaaggctttgccacaatctttacattggtaggaattctctgtaatatgaaatcttttatgttgagttaggtgtaaaagcatgcaaaatgatttttcacattttttacatttgaaaggtttctttctagtatgtcttatcttatgtctgtttgaatttgaaaatgtatgaaagacttttgcagatggatcacattgaaatatgttgctctgggtagttatcaaacactggtttaatttgttatcatgttctttgtgcactttacactcatccacacttttacagcctttttgtaactgtaaattgtcatgtccatattttccatattttttcagaatcgcttcttgaaaagaatctttaatgtcctgctctgcccaaaggtcttggggaaaatgagaacatataactgaaagaaataaaaataacaaattactttacttactagacacagatagtttacaaatctaacctctaatatacaaactacataaataagatggcataggaaaataccaaaggccctcattcctttatagacatataaatgtaaaaaaaaaaaaaccaaccaaattacatctgaaaaaaattataaatgagttaagtgtgtgaagtgcccctggtgagaacaatgcaaagagccacttagaagtaaaagtctgtacatttacccaacagagctctttctgctccccaatataacatactgtctttagaagtaaattgccaacttgtttttaatgacaagtaaaatactggcacatttatctttattacttgcttctaggagcctttccagacactggtttgtgtctctcttgaaatataatgctgaaagaaacggtggtatactttggagtgacagtcttaactttgctgagaccaaaggtaaatgtttcagcaacagagagactgctgtaccacagacagaaaacaggtgtagcacgtgattattattaagaagaaacatgaataaactcctttaactaaaagagaaagacaaaatctcagacaagacacattctaagaacatgtttgagagactcccagaatctctaaccaagacgattgttcagactatgccaggacaaagctacattataaagattgtgacaggtagccttttttaatgtccaaatttcaatcaaggattacaatgtatacaaaataaggcaatatggttccataaaaatataaaattttaaaaaagaaactataaaaaagatgtatacacaccgattttaaaaattgaaaataaattgaataatactcagtgagtgaaacaggaagacagagaactatagaaaatcagaaaaatgaagataagaacataaatatttagaatatcaaaaaaacaaattgtggaggtaataaatataaaaaagaatagctgaaaaatattgaaagaaacgatgtaaagatgaagaagctcaacaaacaaactaggaaacacacaaagatatttataacaaacacatatataagcacaatttcaaaagtcacagacaagagaaccttgggagctgcaagataaaagtgatgcgtcatttgccagcatagtcttatgagacagccagtgaattgtcaataaaaattttgcaggccagaagggaagtgtgtaataaagtcaaactcctgtaaaatacagcaatcaagtaagcataatactatcagcaaatctgtcctgccaaataaaaagaaaataactttcaaaagtaacaaaattctgaaaagtatattggaactccataaaccctacatacaaaatgtactgaaagcagttgcttctattgaaaataacatgattcaacaaaaacaacacagtcaaataaaaatacattactttcgggaggggggagggatagcattaggagaaatacctaatgtaaacgacgagttaatgggtgcagcacaccaacatggcacatgtatacatatgtaacaaacctgtacattgtgcacatgtaccctagaacttaaagtataataatgaaagaaaaaataaaaacaaaacaaaacaaaaacaaaaaacaacaaaaaaatacattactttctgggaaagattatatgcacatatatacttttacttctaagtatatgcacatacaccaaaatggaattccttagcattatcataatggtgcagaaaacatttttaattattctctaaaatttgaaagtgaaaatcagagaaatcattataaacatctgttaataaatatacaacataaaaagatataattagcaaaatcaatgacaaatttgaggggagaagtaatgagaaaaaaaatgtgcatgcaactgaagttcttttttaccagattgaaatatactgttatatcttttagaggtttacgtaatccccaaggtccaaaaaagaacatgtgtgtatagatacacaaaacaagaaagaagtaaaagcatatcaatataaaaataaaaagatacaaagacagagagaaaatgagtgaccaagatataagaatcaaataaaacaattaataaaataacattagtatgtctttctgtttcagaaaattatttaaatatatatgtttaactttccaatcaagagacatactttcaatagagacttatttaaatattttaaaaactgagatccaacttgcctttctacgacagtaagctgagatctattgattaaaaaaaaactgaaagtggcaagatggatgtagatattgcatgtaaatattaaccaaatgagagaagaggtcaaaataatattacataagctacatcttacgtgaaaaactttcatattttataaaatgtactgcaagtcaaaactgcaaagagacaaagaagggcattaaacaataatagattcatttactgataacctaagtgtgtgtgtgtgtgtgtgtgtgtgtgtgtgtgtatctcacattaaggttccaaatacataaagcaaatattgatagaactgaagaaacatctagacagcaatactatagtaggacatttcaataacttactttctgtaataaaaataaatcaaaacagaatatttgtaagtgaagagaggacgtgaaggcagtataaaacaattatttctaacagaggtatagagaagattcctcaacaatatcgggatacacatgcttctcaattgctcatacaacattctccttaatagaccacatgttaggccaaaaaagaagtcttaacacatttgttaagactgagattgtatggattatattacatgaacaaaatgggagtataaaacaataatagaaaaacaattaaacatttacaaatatatggaaattaacacactcttgagcatgctcctgttcaaagatagaaataatagatattttgaaaatgtccatacttttcaaagtaatctacagatttagtgcaatgttgttaaaaatttctcattgcatttttgagaaactagaaacaacaaccccaaaagtatataaaatgtcaagagacaataaagtacccaagagtcttcaaaaaaaagaaaatgttgaaggcattatagttcctgatttaaaagcacattgcaaagctacataattaaaacaagttggtatgagtataatggttaaaaagtagactaataaaatagaatgccacatctatagaaactttcacatatatgtttatatgaagagttattttcatatccataattattgcagcattttttaccaatagcaatgcaagtttctttcctttttctttccttttttttttattttttattttttgagatggagtcttgcactgttgcccaggctggagtgcagtggcatgatcttggctcactgcaacctccgcctcctgggttcaagtgattctcctgcctcagcctcctgagtagctgggactacaggtgtgtgccaccatgcctggctaatttttgtatttttagcagagacagcatttcaccatgttggccaggatggtctcgatctcttgaccttgatatccgcctgcctcagcctctcaaagtgctgggattacaggcatgagccaccgtgcccggcaatgcaactttctgtcaccaaattatccaatagatataatttgcaatataaaaatactggaatatcatccaggatttaaaaagcaggaaatattctaataactctaaaaataaagcttgatgacattatgcaaaataaaatgagctagccacaatgagacagagattgtatgagacacatgaagcagtcacattcttagaaatagaaaacaaagtggtgtttgcaaagtgccagaacatcagacaaattggttgttgtacattgagatttagctttgcaagataaaacattctaggggtatgctgcataacattatcaatataattaagaggaataaacagaatattaaaaaatatttgataatgggcctggtgccgggactcacatctgtaatcccagcactttgggaggccaaggtgggcggatcacaaggtcaggagttcgagaccagcctggccaacacagtgaggcaaaagaatcacttgaacccaggaggcggaggttgcagcgagccaagatcccgccactacaccccagtcttggcgacagagcgagactccgtctcaaaaaaaaaaaattgctaatattttatgtgttcaagtaaaaatgaacaattaataccaagaaagatacagttacaatagtttcaatattatcttcaaatcccaaagtgtttctcccacatagaagtaatgtagattcacaacagatattgaaattaggagaatttttataactggtcacctagccaagattgaacgaccatttacaacaaacctacacaacaaatatacaagtcataaaataaacagagatgatatttgtagaggcaaacaaacacagaggtaattatattggcagtagacatatggctgatttatatttgatttggctagacacagtcttaaattgtacagagttaaacactgtcatacacaatggcaatataaaataaaacaccaaaacacaagcaactggtgttaggtgtcataccttaaaatacataacacaatataaaatatatatatatataatatatgtaaaatatataacacaaaattaaaatatggaatgtaaaacgtattggatgccatcaagtagatcaatatattcatcaaatgaatcttagaagaatatagggaaaaagtaatacagaggtaacttgaagacaaaaaaggctgagaacttcccaaatttttatgtaacaaaaaaatttctaaccaatatttaattcaaaattattttacttcaaaaacaagataaaaataaggactttccaaaataaaaattcagggcatttattacaactaccacagtcctacataaaatgttacatggtggccaggcacagtggctcaggcctgtaattctacagctttaggaagccaaggcagatagatcacttgagaccagtagttcaagatcagccagagaaacatagtgaaactctgcatataaacaaaaagaaatgctaaaatgagtccattatgttgaagaacaaaatgatgccagaagtatcaaaaaaatgtataaatataaaactctctattaaatgtaaatacagacacatatagaatttttttactatcataatgatgcacataaaacccttacagttctttagatataaaaaacaagatataaatctgcataaatctgttaatagatacacaatgtaagataatatggtttttaatattaataacaaattggaaaatataacaacagaggttttgtacttaattgaaggtgtgatgagattaaaatacattgttttaactttaagatgttttatgtaatctgtttttcaatatggttacattatatttcaagatgattacattatacttctggaaagtatgcaaaacaaaataaaaaataatcaaagcaagtcacaacaaaattaaaacaaacaaaaattaaggtagtaacacaggaaatgagaaaagacatatctacaagaaacacataaaatagtaacaatgaggtgatttctgcagatcagcagacttagtctttccccctgctggctgaggaatctgggcagtccagatgtatggaatttctcccagtgaagcacacccccttcaccaagaagcagccagagtgccttgttaaatggttcctgaatcctgtgcatcctgactgagtgaggaccaccccaccaacaggcattgtaagacaacttataaagaagtattcccactgtcatcagctcagtgcccatctgggataaagcttacagatgaaggagcaggcagttctctctgctgttctacacactccactggtgacacctccaggtgtgggagaaacccaggcaaataggatctgaagtggatcccaagcaaatcacagcggccctacagaagacgggcctgactgttaaaggaaaaacagaaagcaaccacagcagcatcaacaaaaatgtccccacaaaaaccccatccaaaggtcagcagcctcaaagaccaaagctagataaactcatgacgatcagaagaatcaaccaaaaaatgctgaaaactcaaaaacccagagtgtctctactcctccaaataatcaaaacatatttccagcaagagcacagaaccgggagaagcctgagatggataaactgacagaagtaggcttcagaaggtgggtaataatgaacttcagtgagctaatgaagcatgttctaacccaatgcaaaaaagccaggaaccatgaaaaacattacaggagctgttaacccgaataaccagtttagagaggaacataaacgacctgatgcaactgaaaaacaacatgagaacctcacaatgcaaccacaagtatcagtaactgagtagaccaagcaggaaaaagaatttcagagcttgaagactatcttgctaaaataaggcagataagattgaaaaaataaaaataaaaaggaatgaaaaaaatcttcaagaactattggattatgtaaacagaccaaacttacaactgattgcagtacactaaagagagggaaagaatggaaccaagttggaaaacatacttcaggatatcatcgagaaaaacttttccaacctaacaagacaggccatcattcaaattcagaaaatccagaggaccccagtaagatactccatgagaagatcaacctcaagacacataattatcagattattcaagtttaaacttcaggaaaaaatgataaggacagccaaccggaaggccaggtcacccagaaagggaagcccatcagagtaaaagtggacctctaaaaagataccctacaagccagaagacattgggggccaatattcagcattcttaaaaaaaatgaatttctaacccagaatatcctgcaactaagcttcatagtgaaggagaaatgaaatcattttcagacaaacaaatgctgagggaattcatcaccactaggcctgctttgcaagagctcctgaaagaagcactaaatatgaaaagaagaaaccactaccagcaaatgcaaaacacattgaagtacaaagaccaatgacactacaaaacaactacgtcaacaggtctgcaaaataaccagctagcaccatgagaacaggatcaaattcacacataacaatattaaccttaaatttaaatggactgaatgctccaattaataccagaacttttggaggccgaggtgggtggatcatgaggtcaggagatcgagaccatcttagctaacacggtgaaaccccgtctctactaaaaatacaaaaaattagcagggcgtggtggtgggtgcctgtagtcccagctactcgggaggctgaggcaggagaatggcatgaaccccggaggcggagctggaagtgagccaagattgtgccactgcactccagactccagcctgggcgaccgtgtaagactctgtctcaaaaaaaaaaaaaaaaaaaaaggcacagaatggcaagctggttaaagagtcaactcactggtgtgctgtattcaagagacccatctcacatgcaacgacacacatagcctcaaaataaagggagaagaatttaccaagcaaataaaatcagaaaaaaagcagaggttgcaatcatagtttctgataaaacagactttaaaccaacaaagatcaaaaaagacaaggaaggacactacataatgctaaagggatcaattcaaggaacacccagatttgtttttattgctcgcttgattgattttttttgagacggagtcttactctgtcacccaggctggagtacagtggcatgatcttggctcactgcaagctctgcctcccgggttcacaccattctcctgcctcagcctcctgagcagctgggactacaggtgcccgccaccacattcggctagtattttgtatttttagtagagacggggtttcaccttgttagccaggatggtctcgatctcccgacctcatgatctgtcagcctcagcctccaaaagtgctggcattacaggcgtgagccaccatgcccggccttattgatttatttttttgagatggaatctcactctgttgcccatgctagagtgcaatggcgcgatcttggctcactgcaaccttcacttcgcaggttcaagtgattctcctgcctcagcttcctgagtaggtgggattacaggcaccaaccactatgcccagctaatttttgtatttttaatagagacagagtttcaccatgtctaggctggtctcaaactcctgacctcaggggatctgcctgccttggcctcccaaaatgctggcattacaggcatgagccacacatccagccagcactcagatttataaaacatacttagatacctacaaagagacttagactcccaaacaatgacagtgggagactttaacaccccactgccaatactagacagatctctgagagagaaaaataacaaggatattcaggacttggactcagctctaggtcaagtggacctgatagatatttacagaactcaccagccaaaaacacaatacacattcttctaattgccacatggcacttactctaaaattgattacataattggaagtaaaacattccttagcaaattcaaaagaaccaaaatcataacagtttctcagaccacagtgcaatcaaattagaactcaagagtaagaatctcactcaaaaccacacaactgcatggaaatttaacaacatactcctgaatgacttctgagtaaataataaaattaagtcagaaataaaaaaattctttgaaaccaatgagaacaaagagacaatataccagaatctctggaatgcagctaaagtagtgttaagggggaaaatatagcactaaatacccacatcaaaaagctagaaagatctcaaattgacttcctaacatcacaactaaaaggaaaagagaaccaagagcaaacaaaccccaaagccagcagaagacaaaaaataaccaggatcagagtggaaccataggagatagagacacaaaaaaaacccttcaaaaaaatcaatatatccaggagctgtttaaaaaaaataaaataaaagagatagaccactagctagattaataaagaaaagagagaagaatgaaatagacacaataaaaaatgataaagcagatatcagcactgaccctacattaatacaatcatcagggcttggcgtggtagatcatgcctgtaatcccagcactttgggagggtgaagtgggtggatcacctgaggtcaggacttctagagcagcctggccaacaaagtgaaaccctgtctctactaaaaataaaaaaataaaaaaaattagttgggcatggtggctggtgcttataatcccatctactcaggcggccgaggcaggagaattacttgaacccaggaggcggatgttgcagtgaaccgagattgcaccatcacactccagcctgggggacaagagtgagacttcattccaaaaataaaaaaaaagaagaaaaaaaaaaaaggaaatacaatcatcagaaaatactataaacaccactatgcacataaactggaaaatctagaagaaatggataaattactggacatctacaccctcccaagactgaaccaggaagaagttgaatccctgaatagaccaacaacaagttctgaaattgagacagtaataagtaggctgccaaccaaaagaagcccaggaccagatggatttacagctgaattctaccagaggtacaaagaagagctggcaccatttcttctgaaaccattttaaatgaaagaaaagtaggaactcctccctcattttataagatcagcatcattctgatatccaacctggcagagatataaaaacaacaacaacaaaaacttaaaaccaatatccctgataaatatcgatgcaggccgggcacagtggttcttgcctgtaatcccagcactttgagaggctgaggcgggcagatcagctgaggttaggagttcaagaccagcctggccaacatggtgaaaccccatctctattaaaaatacaaaaattatctgggtgtggtagcgcacgcctgtgatcccagctactcaggaaactgagtcaggggaactgcttgaacccaggaggtggaggttgcaatgagccgagatggtgccactgcagtccagcctgggcgatagagtgacactatgtcaaaaaaaaaaaaaaaaaaaaaaaaaaaaaaaaaaaaaaaaaactgatggagaatgagaaaactattttaaaattaatgtggaacccaaaaaggccccatatagccaagacaatcttaggcaaaaagaacaaagctggaggcatcatgctatccaacttcaaactatactacaaggctgtagtaaccaaaacagcctggcactggtataaaaacagacacatagacccatgaaacagaatagagaactcagaaataagactgcaaatctacaactgcctgatctttgaaaaacctgacaaaaacaagcaataaggaaagaactccctatttaataaatggttctgggagaactgactagtcatatacagagaatggaaactggatgtggtaagaaaaagagcaagtgtaaggtgaaaaagccaggttcaggccaggcgcagagactcacgcctgtaatccaagcactttgggaggtcgatgaggtcaggagttcgaaaccagcctgaccaacatggtgaaatcccatctctactaaaaaactacaaaaattagctgggcatggtggcgggtgcctatatcccagctacttgggaggctgaggcaagaaaattgcatgaatcagggaggtggaagttgcagtgagccgtgatggtaccattgcactccagcctagactacagagtgaaactccatctcaaaaaaataaaaaaggccaggttcttttaatgaaccagctctcatttgaattaatgaagtgtaaactttctgattatcaaaaggctggtgccaaggcatttatgagaaattcgtccccatgacctaaacacctccctaccaggttccacatccaacattggggattacatcgcagcatgaggtttgcagaacatgttcatccaaaccatatcacagacaaactaggcttaacagacatgtacaaaatttttcagttaaaagcaaaataatacacaatattcttatttgcacctgatgtattctgttagaacacataacaagtcttattgaagaatacgtagtggctgatacgcataatttcaacaatttggaagacaaaagtgagaggatcacttgggaccacaagtataagaccagtgtcagtaacatagtgagagcctgtccctagaaataatcaaaaaattagccaggcatggtagtgcatgtccatagtctcagctactcaggaggctgaggtgtaaagatcacttgagtcaagcaggctgaggttgcagtgagccaaaattatgacactatactccagcctgggtgacggagtatgatcatgtctgaaaatgacaacaacaaataaatttaagaagaccaaaatcatgcactgcatggtatctgaccaaaactgaataaaactaggaattaaaagcaaaagtaaaactggcaactccaacaatatctaaaaataaaacacatgggctgagtgcaatggctcacacctgtaatactaccattttgggaggctgaggcaagagacctgcttgagcacaggtgttggaaactagcctaggcaacataggctagtctctaataaataaactgtctctaataaataaaataaaataaaattaaattaaaacacattcttcaacatattcctgctcgagggtcaaaaattttaattttgttaagatgccaatacaacctacagaggtgaacaaattcagtacaatctctataaaaatctcaatagcacagttattacagaaatattctttaaaatttttaaatgtgattgtgaactataactaaccaaacacccatgaaaagaacaaacaggcattatacttcccgattttaaaacattaaaagctacaataacaaaaacagtatggtactgatacaaagacagataaacagatgaaagagcagaatagagagttcagaaatgaacccttgtgtatatgattaaatgatcttccacaaagctgccatgaacacaccatagagaaaagataatcatttcaaaaaatgttaagaactaaatgtcaacactgataaagttggatcatttccttgaaccgtatataaaaaatgttttcaataaaatacttacataaaaaaactaacgaatctcttagaacaaaatagaaaaaagtcatgacatgggtcttggcaccattttcttagatacaacattaaatgcatgagcaacaacagaaaaacagaaaaatttaactacacgctacttcaaaatttatccacattagaaaaaaaaaacattcaactgtgtaaaaatgcctcataagaaatgggtgaaaatatttgcaagtcacatgtgataagagttaatattcgggccaggtgcagtggttcacacctgtaatcccagcactttggaggctgaggtgggcggatcacctgaggtcaggagttgaagaccagcctgaccaaattacaaattaataatttgtagagaaacacgtaaaaataaaaatgaaaaatgaaatcacctcacatccattacaatggccactataaattttttaaagacgccaactctgttgatgatgcaatgaaaatgaaacctctgttgattgttggtagaaaacaaagttgcagtcattattttaaaatgttacatttctcaaataattaaaagtggaattattatcaaatacagcaactccattaatgaatctatattcaaaatatgcaacaaaagacctagaagacatatttgaacatctatgattattgtaccagtactcacaaaagtcaaaaggctgaggcaacccgggtgtctcttgatttatgaacacatcaaaaatgtaacatatacataaaatggaatattatacagacttaaagaagaaaatcttgtcaattttaagacaaactttgagaatattatgtcatctgaaataatccagaaacaaaatgatggacactgtatgattccacttatatgagatatcttaaatagtcacactcataaaaacagaaagtggaagggtgtttgtcaagggctggggagagggtaaaatgggttgttgttacttaatgggtatttagttttaatttcacaagatgtaaaatttctgtaagtcttttgcataacaatgtgaatatacttaacatggctaaaatgcaattattattattattattttttttgagacggtgttttgctcttgttgcccaggctgaagtgcaaggggcaatcttggctcactgcaacctctggctcccaggttcaaggaattcttctgcctcagcctcccgagtagctgggattacaggcacctgtcacaaggccccgctaatttttgtatttttagtagagatggggtttcaccatgttggtcaggctgctcttgaactcctgacctcaggtggtctgcccacctcagcatctcaaagtgctaggattacaggcatgagccaccacgcctggcatgtaaaactttttttttttttgagacagtctcactctgtcacccaagctggagtgcagtggcacaattatggctcacttcagcctcaaacttccaggctcaagtaattctcttctctcaaatttcccaagtagctgaaaccacttgtgcataccaccatgcctggcaattttttaaataattttgtggaaagggaatctccctgtgttgccctggctggtctcaaacttttgggctcaagtgatcctcctttcttgacctcccaaaatcctgggattacagctgtgaggcaccaccatgtctggccttgaaatgtacacttaaagaaatttaagatggtaggctgggcgcggtggcccatgctgtaatcccagcactctgggaggctgaggcagagcgatcacttgaggtcaggaattcaagactaacctggagaacatggtgaaactctgtctcttctaacaatagaaaaaattacccaggcgtggtggcgggcacctacattcccagctactcgggacgctgaggcaggagaattgcttgaacccaggaggtgggggttgcagtgagccgagattgcgctattgcactccagcctcggcgacagagcaagactctgtcccccacccaaaaaaaaaaaaaaaagatttaagatggtaaattttatgttacgtgtttttacaaccattaatttttctttttctttttttttttttttttttgagacagagaattgcttgaacccgggaggcagaggttgcagtgagctgagatcgcgctattgcactccagcctgggcaacaacagtgaaacgccgtctcaaaaaacaaaaaacaaaaaacaaaaaacaaaagttgaagaggtatttcctccatcaaattcacagacaccaatgcaaaactatattgtgcccattgtcaatgcttctattttaacgtaggactggaagtaagtggcagaatgatgagtcaaaaacatttttaaaaagccactgaaattgaagaaaaataagttactttttgtggatcatatgatcttatatataaaaaaaccataaacactacattgaaatttgtctaaagtaataaatacactcagtaaattagcaaaatataaaattaacatacaagtataaactactgttccatacattttaaccatctgatacaataaagaaaacaatcttatttacaatagcattaaaataataaatttctgagaggaaatttaaccaagaaggtaaaaaaaatctttacaataaaagatataagatagaccaggcacagtggctcacgactgtaatcccaacactttgggaggccggggcaggcagatcaagaggtcaacagatcacgatcatctggccaacatggtgaaaccccatctctactaaaaattaaaaaaattagcttggcgtggtggcatgtgcctgtagtcgcagctactcaggaggctgaggcaggaagattgcttgaacccaggaggtggaggttgcagtgaaccaagatcgcgccactgcactccaacttgatgacagagcgagactccgtctcaaaaaacaaaacaaaacaaaaaagatatatcaatgaaataaattattgaagacacaaattttaaaatatttcatgtccatggattgaaagaataaatattgttaaagtgtcatattatctaaagtaatctatagctccaataaacttcctattaaaattccagtggcatttttttccacagtaataaaaaatacaattctaaaatttataagaaactgcaataaacttcaaatagccaaagcaatcttgaggcaaaagaacaaagcagaggggtattatactttataagttctaactatatttcaagaatatagtaataaaaacaggatggaatgtgcaaaaagattaacaaacaaaacaacggaacagaaaacactactttcacacatttcagacatgatgaaaaaagagaactaaaaaatagtttaacatagagtttcccaaaattatgcagatatctgtgtgtccccccaaataatggaaaagtagggagattgtgcagtcttttatatgccttgaaaaggactctggctctcactgtaaacctgaaggaagatcaccaaaaggaaagtagaatctttaaagaatttaaaagcataagacagaagatgcccctacgtgacagccaaaaaaaaaaaaaaaaaaaaagcccaaaaaacaaaaacactcaggcatcccagaaactatttcctttggaacatagcttcccaaaccacattttaatgaccagctttctttttgacctttggacctcacatctgtgtcatctgttgtgttcactctcacctacctgggggtttggctaccatctcatgtctctttatattccagggctcttttccttgctccagacaggtgatcaggtctggcttagtgagagcaatacctgctttattagaaataaataacatgaatctttctcatattctccaattaccaacctagtactatgcttagtaaagaggaggtgatagaatattctagaaaattaatcctaacgtactaattaatgagagaaatttctaaatatttagaaaatattttaaatttgtaggttcttaatttcactacccggtactcatgaatcaaaaaattggtggtgatgaatggattttaaaatatgggcaaatatatatgtacatatatatacatttatttatttttgagacggagtctcgctctattgtccaggctggagtgaagtggcatgatctcggctcactacaacctccacctcctgggttcaagcaattctcctgcctcagcctcctgagtagctgggactacaggcgcctgccaccatgcccggctatttctgtatttttagtagaaatggggtttcactttgttggcaaggctggtctcaaactcctgacctcgtgacccgcctgcctcagcctcccaaagtgctggtattacaggagtgagccaccatgcccggcctaaaaacatgggcaacaatattttatgacactaaatttctggaattaccactaatctagagtgaaggatacagatcagctcaggaatatggaaagttcaggtcaagatgaaacatcttgaatacattcttttccacacacagcctcaagattttcttgaaaaaacggatcagaaactcatttatgcaaagcatgaattaccaaaaatcattccacaaaaaaagagaaacctttacggtatattagaaattgtgtattaaagttattctcacccaagaagaccaggtttctgtagttctctaacatcactttcctatacaaaccctgctgagcactgtccaggcattgccactcctccagagagaattctatggccacatccctaaacgtcaatggcccctgaaaagcacaagcacagagacacacatatatttaccaagtggccatgggcagaatttattatttgaattaaaatgaaatgacagagcaaagagaattggttctgattaatagaaatgacaaattttccaataatttttaacacagaaatattctctaaaatattctctaattctgagagaagagaatggcataagatccacaacaccagtgtatatatgacacttttctagataaagtataaaattaagagcataaacacaaacatatacatttttgagtgttattatttatatcataaagaatgagttgtgtatatttttcagacaaaaaagagatgttgagttagaaggcacctcctgaattttaatgtttacaataaactggaaatcttgtgcagattttttttcagaagatctggaatgaagtctgagtttctgaatttctttcttttttttttttttctgagacggagtctcgctctgtcgcccaggccggactgcggactgcagtggcgcaatctcggctcactgcaagctccgcttcctgggttcacgccattctcctgcctcagcctcccgagtagctgggactacaggcgcccgccaccgcgcccggctaattttttgtatttttagtagagacggggtttcaccttgttagccaggatggtctcgatctcctgacctcatgatccacccgcctcggcctcccaaagtgctgggattacaggcgtgagccaccacgcccggccgagtttctgaatttctaacgagctcactagtaatgccaaagtttttggccccaaaagaaaattctgtgaaacatccagtaagtggaagagcctgtgttttaccagatttttctggcctgtaaaacaaagagccttcattttccaaagacagctacatgcaaagaaaacataagaaaaaagggcagctgccagattaaatgtgatggcttatgcacattaactgcataaagatgcctaataatgacaagaaaaatagttaactctgtagtgaaagaaatatcagagagctttttaaccaagtaaattattaatatcaaccatagtaggacgaatttttatgttgtgcttatgcacatagaagaacatagcatcattgcctagatattgcccctccaaaagtaaattatattctgaattcaatcatacagaaacatcagttttatgcaaagttcaagatacaggtatctccaatgttctgtaattttcaataatgattttaagtagtctttcttcagcaccctatatagcaggtatctctcaatcttttttcagaactttctgggtaataaatgccatcctatttaagtaagtattttcttaatcctgttctgcatagagctaatggagaacacagatggaacctcaacattacatattctccacgtaaaccccagctttccccaataggaatcttgagtatccacatccttccatgttcaacagccacaatgggaacatttttaatagtgcagatcataaattcatggtaggaattctgcatggcatataagaagccatgatattgagaatgtagagaaggctctagtacataggaaagaaatattttgcatagacccttgactatcattagaattttaaaaagtagttaaactcattagtaaggaaaaacacaagtagagaagtaaaggtttgcaaatactaaatgcatgagactctagaaaagagtggacaaagctcttgatgtgagacttacttagctgaagaaaaaaaaacatcatttttcctctttctccttcttctcttggaatccttttcagatgaaattctctaaagaagtaacatctacatcttgagaaaactgccttaaatgtgtcagcaccaccttcttacctgctagcaccacgcccacagacagaaggaccaagaccaaaaagtccacccatacctctcccttataacagaggagattcaggaaaaatgtgctgctccatggatgtaaaaatgtaagtttctcctttcctgtctcaggtgccctcccctgccacaaacaccagcaatttctgctacagtaatgaacatatgggccacactgccctgtccctaccaaacccaaacagaacaggtatcgtaaccaccctttagtgcaaaggtggcacttaactctcatgaatgtatcttgaagccctcatacttcattctggcctcaccttagagtcacatgaggcacttcattaaaataacatggatgcttccacccacaacaataaacagaagctgtggggaaggcacaagagatttttgccaactggtcatgtgatcttaatgagaagcctgggctgataaccacttagctaagcattgcctctcaagctttaatgagctcaaaaatcacttggtaatgttggtcccactttatgtaatgtgattctgcatgtttggaaagggttcatgaatgggtgtttcaaacaagtcccctgccaatgctgatgttgctcccccaggctcatcattagcattagtgagagaaagcaggcaccgcacagagtccctgacattcagcactcttgtcacaacacaaatacttctggtacaaatgaagacaaccacactccatcctgaagttttatattatttgctggctctttaaagtttacagaggaaacaaaaggcagcaatgttggaataagtctgcatttggaaaacaacatgtacacatgtactaatgcaataattattaagcaggtactatgtgctcaagagtacaatatagagcactgtgctgggcataacatattatgtgatttaatccccataacacattggaagttgatactaagtgttcagtaattctcaggatttagataaagggcccagcattattacttcttcctctgtttctctgttattgattttttaaaaaaatgtacagaataaggctaaatatagacagaggagggggcatagaaagagtttaagaaatttttttctatttatatttacttgtctgtgacttgtggagcaactactggatctgcaagaatagaaaacaagctgctaaatggaatgtttctgtaagcactggttttaatacaaaatttaaaaaaataagatgttaaaatgtatagtttatttttcttatttatctgcttttgggttgcaggaaattgtaagcaccagctctagaaaggcagaaggatttaccggccaaaactctgacctttataaatcagttctgtaaggcaagactccaaagtgggccagacctaaagaaggccttcaaaaagggtgaatctgaacagaactggggcagggaaaggaccctatggagaattctgttctctgccactggagtatttccagttctgtttttcctaagcttacctaagaaaaacttaaatcctagagtttatgtaactttaatctatttttgccactgctctgtcaattttataactatactaacaggcaatttaaatgactcttttaaagttttctggaataatttcattagaagataagtatgtattctaacaaagtaaaagatacacaaataatactaacaactcttcagtccataaatatcccttcaggtgataacctcagaagacacaacaatataaaaagaagtgggcaaagtttttttgttttgttttgtttttgagatggagtttcattcttgtcacccaggctggagtgcaatggcacaatcttggctcaacgcaaactctacctcctgggttcaagtgattctcctgcctcagcctcccaagtagctggaattacaggcatgcaccacctcgcctagttaattttttgtatttttagcagagacagggtttctccatgttgttcaggctgatctcgaactcccaacctcaggtgatccgcctgcctcggcctcccaaagtgctgggattacaggcgtgagccactgctcccgactgaagaggccaaagttttgttttgctttgcacacatctattcaccgtaccaaccatatgatgtttaattcaaccgtgtatccagttgctagtctagagcaaaagtttctggatggtagggaccgtgactgcttcatctattttttgaatgaccttatgaaatggaagcaattagtttatcttttgagtcaccggacctcctctttgtgtttcaccaaagtaacagcaaactagagaaactctcatctgggtaccaaccaaagttatctcttgtatgagtatgaagggagaaaaaaaaaaaacagaatgactcatttctcttacaccgagacagaagcagaattaaccactcgtcagcctgaaacaattctgcactggacatcctcaaatgtctcaaagacatctaggtgattgtgagaaggttcttactgaccctgggctgatggcccagtgataagccaggctgagagagattcatgctgattctaaatagaaaatggaactgccttggtggagctccagaacctgcatcacctatcctgacttgctagcttttgggtaagaagaaggacaagaatactctactccagtatcatattttacaggtaggtatagttgtggtcatggctctggatactttgtggccttgatctctcactcttaagatgctcgtttacacttacagattctgtcatcaaattctatttatacctggagtctctcacataactgtagcaggtcactcactaaacaagatctgaaaagcttgaagagccacactctcaaatgggggcttcaagatttctacactgacatctcacaatacagaaaatgccttctgttggttttcagtacattctcaatccaaagtcttctggccctgtcttgtaaatcctaggcagaggccagaccttatgtgcagattctaggtgggatcaatctgactctgcatccttgggtgttacagcaaacagactacaatcaaaggagagctcccctcatagaggctgctctggcacattctaaataatatgtctaactaaaagaaaaaactgaggcaacatgaatataagtagagagttcatctgggccaagcttgaggactgtaaccttggagcaaaaatacatcttccaaagactgaacaaataagaaattgaatccctgaatagaccaataacaagtgccaaaactgaattggtcttaaatggccaccaatcacaaatagcaaagaaccagacaaatttacagattaattctaccagatgtacaaagaagagctggtaccacttctaatattatttcaaaatattgagaaaaagggacttctttttcagctcattatataaaaacagcatcattctgataccaaaactgggaagagacacaataaaaaaagaaaacttcagaccaatatccctgaggagcactgatgtgaaaaacctcaataaaacactggagaaccgaatccaggagcacatcaaaaaacttatccacctctatcaagtcggcttcatacctgggatgcaaggctggttcaacatatgtaaatcaataaatgtaatccatcacataaagagaacgaaagagaaaaacacataattatctccagatgagtcagcttggggaggcggaggcagcggcagcgcggcgagcgtgcagggaggccggagccctgcccggggcgggtcgcggggtgggcgggtgaactgccagcgaggaggcacctgcttgcgcgggtgcagcctgggctgcgccattgttgggggaggggcggctgctgagggcggcgagtagggggctagagaaggcgccagccccggcccagaggagcagagacgccccatggggaacacgctgacctattgcgtgtccccccagtaccagcctcaagctgggccggtgcgtggtgccagagctgtactgcgcaaccgacatctacgaggcggcacccggggatgcggtggcggtagcgcccgcttctgtggagcctaccagttggatttcgcagcgggcgagggccaccacctgcagcacatcagcgaccacgagatgccctaagatttagctttggagtcaaacccttctgaccatccaagggcaagcacaagtttcctgagcaaatctcaaaccgatgtgcgagacaagaggaagagcaaccacttaaatcatctatctccagggcagcttactaaaaagtatagctcatgctcaacaatatttctaggtgacagaacagtcagccagcctaaccttagaaccacagtaaaatgtgaccttagaaatatattaccacataaagaacagagatgcaaacagatccctggatatttttgatgagagatcacatcccctcacacgagaaaaagttccacaggaatagtttaagcatgatcctgagcacaaatttatttacagatttgttcatactctttttagtgctgcacagctaacagctgaatgtgcaacagtaactctggtttacttagaaaggcttttaacttatgctgaaatcgacatttgccccactaactagaaaaggattgttctgggagccactcttcttgcctccaaggtttgggatgatcaggctgtatggaatgtggactactgccagatcctcaaggacattacagttgaggacatgaatgaaatggaaaggcatttttcggagcttcttcagtttaatattaatgttcctgctagtgtttatgccaaacactaccttgaccatcgctccttagcagatgaccacctgaattttctatttgctcctcttagcaaagaaagagcacagaacctagaggctatttctagattatgtgaagacaaagacttgtgtggagcagctgtaagaaggtctttcagcgctgatcaacttcattggtattcagcactctaaagccatcctctcttaaagggagaaatgaggggttataatgtcacgggaccttcatctacaaagactggagaaataccacctttcctgctcaaaaaccagcaaaattagtgttttcatcaaaaggaaagatctcaaattcaagagacgcacggacaacaaggatcatactccatagaaaagaatgggaccttgtcaatgcaacaaaacactcttctgtcctttttaatgtaaacagagtcaccaaaaccactccaaagtgaaggctcccatcccacacacagatatttgcttacaatgtgggccagtaactgaactatgttaggttttttaaacaatagtttaaatttttagactttaaagacattaaccatataacttttatgtttcttccagtttttctccccctgctcattttgctgcatatgcctttagaatcaatgcagtattgcccttaaaacaagggactctaactaaagccacttaggagcagactgcagcattgttaggtattgaagggttcttcctccctactgttaccattaaagctgctagtcattggcaatcattttaaaccaaaaagctgatggataacatttgtcattcatattctttgcaagcattactttagcattttagcatgtctgcggtcataaacaaaggaagtatcagttatgatatctacttctattggggtccatgttgcatttcttgtgaactataaatggtacttctcattttctgataatttttatcttattaaataaatgtattaaaagatattttcataatgccaatgaacatggtggttcagtgacagtgaaaaaaaagtaaagcagttttaagctttaatatagtttgggccctccaaggtactgcagcaggagtataaatgctataaacctttgaaaaacatcatttgagagttttgttttttttctttaagagatgggggtcttgctgtgttgtccaggctggagtatggtggctgttcaccagtgcagtcatggtgcactgcagcctagaacttcctggcttcgcgccatcctctagcctcggccacacgagtggctgggactgcaggcgcaccctgcatttgtctcctgaatgttaggcttttgattttttgtttcagtcactcttgaagtcactcttgactgaagcaaaaaattaaaagctttatattcaaaattctcaaaatgaagctgggtgtggtggtgcacacctgaggttccagctacttgggtggctggaggattgcttggggtcaggtattggaggctgcagtgtatcgtgatggtgcctatagaaatagctactgcacttcaacctggacaacatatcgggaccccatctcttagaaaaatgcaaaattaaatgcaaaagaaatgcaccgggcatagtgattcatgcctataatctcagtactttgggaggctgaggtgggaggattacttgagcgcagcagttcaagaccagtctagtcaacacagtgagcccctgtctgtaaaaaataataataaataaaaataattagctggatatggtggcgtatgtctgtagtcccagctactctggaggctgaggtgggaggatcacttgagcctgcggggtcaaggctgcagtgggccatgatcatgctactgcactccagtctgggcgacatccagaccctatctcaaaagaaggaaaagaaaaacattcaggcaaggttttatgaaggtttgtagcacttctacaagtatcaaagcttaaaattacattaaacctttggaatatcttgtatctccataaaatgcccttctctttttaaaatgaattacttgcagagctgtgctctatatgcattgatcaccgaagtttctttaatttaaaggaagattttgaagagcactgttaattaacatgtaataaaaggaactgggccctaatgatagaaggtgatatgaacagctgttttatcatcctacatgctaccaacctgtaggtgtcccattaagtcctgctatttaagaaataacttacataacccttaggaacacttacttcaggctttaaaaggcaaggaacaaataattttaggagactgataatgccatctaaatttgaaaaactaaaaggagattagtgttctcaattatgtgaaatctatttctcctacttactcaaatctaatcctaggaatcttgcttataaacaaagcattcctgggccaggaatacttcctctactatagcaatatttcacatcatattgtgctgcaatttccatcatttttaaagggcagagaaataaatgataaataatggtataaaaatattacaatctaccacctcaaaaaaaaaacaacaaaacattgtttatggagttcagagcttggagagtcaagtattgatagctgttttattttaaaaagaatgttacaatttatgtggtttttatttctcatgtttatattaaaagttaataaactcttttaattaaaaacatatcattatttcaatagaaaaaagcctttgataaaattcagcatcccttcatgttaaaaaccaatggaacagaacagagacctcagaaataccaccacacatttacaaccatctgacctttgacaaacctgacaaaagcaatggggaaatgatcttctgttaagtaaatggtgctggggaaactggctagccatatgcagaaaactgaaactggaccccttccttacaaaattatacaaaaattaacttatacaaaaagtaactcaagatgggttaaacacttaaatgtttaaccataaaaaccctaaatgaaaacctaggcaataccattcaggacaaaggcatgggaaagacttcatgacaaaaacaccaaaaggaatcgcaacaaaagccaaaatttgacaaatgggatctaattaaagagcttctgcacagcaaaagaaaaccatcatcagaatgaacagacaacctacagaacaggagaaaatttttgcaacctacccatctgacaaaggtctaatatccagaatttataaggaacttatacaaatttaaaagaaagacaaccccatcaaaaagtgggcaaaacatgaacagatacttctcaaaagaagacatttatgtggccaacaaacatgaaaatacactcagccgagctcacgcctgtaatcccagcactttgggaggccgaggcggctggatcacctgaggtcgggagttcaagaccagcctggccaacatggagaaacccgtctctactaaaaatacaaacttagccaggcatggtggggcatgtaatcccagctactcgggaggctaaggcaggagattcgcttgaacccaggaggcagaggttgcagtgagccaagatcgcaccattgcactccagcctggccaatgagagtgaaagtccgtctcaagaaaaaagaaaaaaagaaaaaaaaaaaagctcaacatcactgatcatcagggaaatgcaaatcaaaaccacagtgagatacatctcacaccagtcagaatggtaatgattaaaaagtcaagaaacagatgccggtgaggctgtggagaaatagtaacacttttacactcttggtgggaaggcaaattagtctaaccattgtggaagacagtatggtcattcctcaaggatctagaccagaattaccatttgatccagcaatcccattactgggtatatacccaaaggaatataaaccattctactataaagacacatgcacatgtatgtttactgcagcactatttacaataacaaagacatggagccaacccaaatgcccatcaatgacagactggataaagaaaatgtggtacatataagccatggaatactatgcagccatcaaaaggaatgagatcatgtcctctgcaggaacatgaatgaagctggaagccagcatcctcagcaaactaacacaggaacagaaaacaaaacattgcatgttctcactcataagtgggagctgaacaatgagaacacatggacacagagagggaaactacacccacagggcctgttgaggggtgaatggtgaggagacagaacatagaggacgggtgaataggcgcaccaaaccaccatggcacacatacctatgtaacaaacctgcatgttctgcaagtgtatctccctgcttttttagaagaaattttttaaaagaggaaaaaaatgttacttatcacataaaccaaaactaaagacaaaaaccacatgattatttcaatagatgctaaaaaagccttcaatataatttactatccttcatgtttaaaaccctcaacaaactaggcattgaaggtacatacttcaaaataatgagtcatctttcacaaacttacagccaacatactaaatggacacaagtgagaagcattcctccttgaaaactggcacaagacaaggatgccttccctcaaaactcctgttcgacatagaattggtacagtctcagcagaaaagctctttaaactgaaaagcaagttctgcaaagtttcaggatactaaatcagtagcatctctgtacatcaacaacatccaagccaaaagccaaatcaaaaacataatgccattcacaattgccacacacacacacacacaaatatcgaggaatacagctacccaggaatgtgaaagatctctatgacaagatgatcaaacactgcttaaagaagtgagagatgacataaacaaatggaaaaccattttatgccatggatagaaaagattagcatcactaaaatgtcaaaactacccaaagaaatttactgacttaatgctattcctatcaaactaccaaaaacattgttaacagaactaaaacttaactattttaaaatttatatggaactaaaataagcctgaatagccaaggcaattttaagcaaaaagaacaaagctggaggtattacattaaccctcttcaaactacactacagggctacgataaccaaagcagcataatactgatgcaaaaagagatgcatagaaaaatgcaacacaatagagaggccagaaataatgccacacacctccaactatctgatctttgacaaagctgacaagaggaatgaggaaataattccctatttaataaatggtgctggaacaagctgggagaggtggctcacacctgtaattccagcactttgggaggccaaggtgggtgtggatcagttgaggtaaggagtgcgataccagcctggccaacgtggtgaaaccctgtctccactaaaaatacaaaaattagctgggcaaggtggcacatgcctataattctagcactttgggagcccaaggcaggtagatcacttgagatcaggagtttcaggccagcctggccaatactgcaaaacttcatctctactaaaaatacaagaattatcagggcatggtggtgcatgtctgtagttccagctactcaagaggctgaggcatgagaaatgcttcaacccatgaagcagaggttgcactgagccaagatatgccactgaactccagccttggtcacagagtgagaccctgtctcaaaggaaaaaaatagtcactaacagatactggcaaggttgcagagaaaagggaatgcttttatacactgttggtgcgagtgtaaattagttcaaccattgtgaaaagcagtgtggcgattcttcacagaactaaaaacagaattaccatcggacccagcaacctcttaactgggtatatattcaaagaaatataaattattctaccataaagtcacatgcacatgcatgttcatttcagcactgtttacaataacaaagacatggaataaacctaaatgcctatcagtggtagcctagattgaaaaaaatatggtatggtcagatgacagagctcattcttgtaatcccagcactttgggaggccaaggcaggtggattgccttagctcaagagttcaagacgagtctgggcagcatggcaaaaccccatctctacaaaaaataaaaataattaggcagacatggtagtgtgtgcctgtagtcccagttacttaatgggctgaggtaggaggaccccttgagccttggaggttgaggctgaagtgagccacaactgtactgcacttcagcctgtgtgacagagtgagacactgtcttaaaaaaaaataaagaaaagatttaatagaaacaaaatatggtacataagcaacatggaagactatgtggccataaaacaaacaccaccaagataaagatctctgcagcaacacggatggcgctggagaccattagccttagaaaactcatgcagaacacaaaaccaaatgcatgttatcatttgtaagagctaaataataagaacacatggacacgaggaacagtcacggggcctagctgagaatggaggatgaaaggacaaagaggatcagaaaaaaatacctctttggtgctatgcttagtacctcagtgacaaaataatctacaccaaacccccatgacacaattttacccatataacaaccctgcacatgtacacgtgtagaaaaagaaaatccatgggtggggaagaatgcagtgtaagtggattgtttgttctacagacagtggcccaggtggcgctgtactctgatttatttctgggtccatgcaggcagagaagattatgaacaggtagtccaggaccctaggctggtggagaaaacaggttgctgctgcagattcattgtctgggggttgggatatgccaggagacttgtggacacttttgtggctttttggcaagaaatactaggatccacaacgctgtagtgaaattcccaagtgtggtgactagtcctgggaggggtgtggacacgtcaatgtctagtgggtatgtttgtgagtggatcagaatcctgtggtgatagctgtggaacaagggggtctgtcatcagagttcctttcctctaagttttcatcctctcttaccctagaagatctggaatcacacgacaatgaaaggctttgttctcctttagacgagaacagagcctcccactccaagacaccaagagttccattccaggccaggtctccatgatatctttcttctaccaccaaaactgcagagtttgctgaataccaagcaattctctagcaccaactcaatgtctaacattcgaattctgacaccatgcagagtcagcaaagaccctgattcaaggtttagtctcataacattgccctctttgcagttgccagtcacaaaccccataggcccatctatgtttctgggctactgtttaaaaactgaggactcctgcgaccttcctcaagttcaataatttgatggagctactcacagaactcagcaaaacactgcagctatgtttacagattataaaagatacaacccaggaaaaatcaaatagaagaaatgtatagaacaaaaagaagaggtggggaaagatgaaacatatagataaccctggtaaatagctgtgattaataaaatttttcatcctctgtgttctccaggaacagtttatggaaagaaacactcttccattatgaattacacagtgctctcttttcttttttatcacatagccacagactattgaactagagcaactcgattttgaatatggctgagtaaaataaggctgcaaccactgggctacattcccagatggttaggcattctaagtcacaagatgagactggaggtcagcacaagatacaggtcataaagagctggctgataaaacagtttgcagtaaagaagtgggataaaacccaccaaaaccaagatggtgatgagagtgtcctgtggtcatcctcactgctacacccccaccggtgccatgacggtttacaaatgccatggaaacatcaggaagttacaccataatggtctaaacaggagaggcataaatattccacttcttgtttaccataaaattaagaaataaccataaaaatgggcaaccagcctatggagaaagccattctcttatatctccactttcttaataaatgtacaggccaggtgcagtggctcacgcctgtaatctcagcactttcggaggccgagatgggtggatcacctgaggttgggagttcgagaccagcctgaccaacatggagaaaccccatctctactaaaaatataaaattagctgggcgtggtggcacatacctgtaatcccagcaactcgggaggctgaggcaggagaattgcttgaacctgggaggcagaggttgcactgagccaagatcgagccattgtactctagcctgagcaaaatagtgagactccgtctcaaaaaaaaaaaaaaggaaattgctattattctaatatgactaagtgtatgttattaataattacactttgggaggctgaggctagcgagtcacctgaggtcaggagttcaagaccagcctgtccaacatggtgaaaccccgtctctattaaaaatacaaaacttagccctgcatgtgatggcaggtgcctgtaatcctagctagttgggaggctgaggcgggagaatcgcttgaacctgagaggcggaggttgcagtgagccaagattgcaccactacactccagcctaggggacaaagcaagactccatctaaaaaaaaataaaataaaataataataataattacattgttacctaaaatcattgtatgccacagagctaaccaaatttccttgtcaattttttttttactgtaactgccctaagactttgccatccagacaatcatcttgtgttgatcctcttcaaaagatgatttgtagtccactataagacaatgataggtgttcttaaatgcaagtttctgataacattagaaattgtgacattagaatagaggaagaactttcttgttttttttttttttttttttgagatggagtctcactctgtcgcccaggctggagtgcagtggtgcgatctcggctcactggaagttccactttgcagtttcatgccactctccttcctcagcctcccgagtagctgggactacaggtgcccgcaaccatgtcccactatttttttttgtatttttagtacagacagggtttcaccatgttagccaggatagtcttgatctcctgacttcgtgatctgcccgcttcagcctcccaaagtgctggcattacaggggtgagcaaccgtgcccggcctgaggaagaactttcaatactaatggagaactaaaatggtcatgactatcaaacagaacaggaattaactgagtggactgaactaatagaagactgaagtaatattttttgacttcgcctaaaacatcactgatcctttgttttgtttttcagagtcaaaaaaactattcttttgaactattcacaccttttaacaattgagtaaagtatacacctgtgaaaaaaatttggaaaatatttgtgagtattctgaacttaaaacaatttagttatttatataagtgcaataagaaactgttttcttttacaacaggacacaattagagaaacttgttattttaccaaggcttctgactagaatgacatactttgctttaatgaactaaacttgacttgtagaaccaataaagctccatgggaaaactggtattataccttgtctacacagcccctgtacagggttcctggctagcggtaaataaaaaaatttcttatctgagattccttttatgaaacaaggttccatcaaacccaatttaaaaggcctatgtgaaaaataattattcttgctacactttatagaaataatcgggccaagtataagactaaaactttttttttttatgttcacacttcacattgtcttatgtttatttgcagttatttttgaacttgaagatggcatatcttccagccatagcagttcacttcttcatgttaatttggtggctaacacaacaggtaatatccaccacccactcccaacctacatcctgctgatcttgctttgctcacatcttggagacaatagagttcacagagttgagtctgtggctagagccggtcagaaagcatgaatctgaaagatatttttaaaatagcactagtaggccaagcacagtggctcaccagcacttgggagaccaaggcaggcagatcacttgaggttaagagttagtgaaaatacaaaatcagctgggcatggtggtgtgcacttgtaatctcagctactcaggaggctgaggcaggagaatcacttgaacttgggaggcagaggttgcagtaagccaagatcatgccactgcactccagcctggggaacaaagcaagactatgcctcaaaaaaagaaaaaaaaatagcactcctaaacaaaacagtcacaaagcttagctttctctttctactactaacagtgtcataagatggattatgtaaaaatctggattactgtttgaattatgaagacatgacaatcagccacgacttcctatcagcttggttccaacaaatgcccagttcatgaaaagctttcttaagtttccttggaagaattttgcttattttgctttactgttgtagaatatattgccattctactccttgtgtagaaatgcagaataaacttactgggtgttttcttaaagtgaacacttattaatcttccagatatcacctattgttggaactgggagttaggaatggccgtcatcaaactgatgctttctgattgagctcctctctacctcaaatacaaaagacgctaataggcaagaatatcatcacctctattcagcatgaagtagtaacagaagattgatcttcgtcccactacaacccttaggattaagggtttccttgtttaaaaaaataacaataataatagagggggaaaatgtcagaggcatattgaaccaaagcaaatccattttgaatagggcctgggtaaaacagggctgagatctactggcctgcattcccagatagttaaccattctaagtcacaggatgagacaggagatcagcacaaaatacaggccataaagacctggctgataaaacaacttgcagtaaagaagtgagataaaaccctccaaaaccaagatggtgatgagtgtgacctctggtcatcctcactgctacactcccatcagtgctatgagagtttacatatgccatggaaacatcaggcagttaccctttagggtccaaaatggggaggcataaatactccaccccttgtttagcaaataatcaaaaaataaccataaaaatgggcaaccagcagtccttggggctgctctgcctgtagagtaaaccattcttttatttcttattaataaacttactttcactttatggactcaccttgattcttgagtgaaatccaaggaccctctcttggggtttggattgggacccttttcggtaaaatctctgcacatattttttctttttctcatgaaaaaaaattggctaaggctggcgtggtggctcatgcctgtaatcccagcactttgggagaccgaggtgggcagatcacaaggagattgagaccatcctggctaacatggtgaaaccccgtctctactaaaaacacaaaaattagctgggcatggtggcacgcacctgtattcccagctacttgggaggctgaggcaaaggaatcgcttgaacctgggaggcagaggttgcagtgagccgagattgcaccactgcacttcagcctggcgacagagtaagactccatcccggggggaaaaaaatcagctaaatttgtcttcagtggtctaagtaaaattttacgtgggctcctgaactttgagctaccctcaatctgagctaacttaaaacttcattctgtgcccctcctaagaacatgctgacttcagggtaaaacattctctaatctaaaatctaaccttttcaatctccaactgccattcccttcccaccttctctctaatcttttttgctccactgtatgaaagaaagccctcgtctgcctaaacttggcaattcttaaagtttttatagttggtattcctcctgttctaatacttttttggaattcaaattttttaaataaattgaacttggttatacattacaaagtctagaaactgccttaaaacaataacaacttcatcatcagcaagaccctcccaatccccttttatgttaaccttaactgcatctgcctgtgagcccccagctttccaggactctgtagcttctctcagcagataggcttcttccatggctgcagtgagaaggctgggacatctgcaggagagactccccagaaaaaactaacaaggccgttattaaatttcttctgcaggctcaatattagccttagctctgagtcactgggaccaagctctaatttccatgttaagagttattcacttggttgttgaaattaagtgtctgaaaaatccagcaaaatgcagtgttcatataagggaagggaattttaaggtgcttacattttatacctcaataagaaaagcaaaagtatcaggccgggcatggtggctcatgcttgtaattccagcacttcgggaggccaaggcgggcagatcgcgaggttaggagtttgagaccagcctgaccaacatagtgaaaccccgcctctactaaaagtacaaaaattagccgggcatagtggtgcgcctctaatcgcagctactcaggaggctgaggcaggagaatcacttgaacccgggaggcggaggttgcagtgagccaagatggtgccattgccctccagcctgggtgacagaaccagactccgtgtggggaaaaaaaaaaaaaagcaaaagtatctatttctttcagacaataaacgtattactttattaattccatttaaaattattttgtaaacaatgagtcatatgggagcacttctaaacagtaccgagtttcatctcataaaatttagcataaaactcaaaaatcaatgtaacaggatctgaacacagatattcactgtcacaaatttaccctgaaaaaaaagaaactgatgttttaatgaatctatgtaactcaccaattatccaccacattttcttgtggaaatgtattcattttccaaaactaaaattgagagattttgcctgggagcattctaaaagctaagccttgaaattctgtttgaaatcactcagccataaaaaaaacacacctgagaaaattcctaactcactctgggaaaaacagtaaatgagaatttttaacaaatttttgacaaatgaaatacatgatcagacatttttttctgaaacccacctctttcatgacctttgtaaatatttttctacctttcaagccctactaatataatgcaatttacagctaaaaaactgaggtcaaaataagtgacaaatatcttcaaggtgacaaacccaggtagtggcagtgctgattaaataacagatgtgtctgactcatgtttcaagtcaggtcattcaatcactggagagattcttccacccactcctgctcacttatgtgctcaagaaccacccactcagaagacactgcattatgccccagtgactgccccaggtgcattttactttgcaagctcttacaccatctcactggggtcagttctgttgttgtttgtcttttggaatactttttggtaacaaaattttcacttttttttccaatatttttctttatatttatttcactatttttctgccccccttagatgatccagggagcagaaattatttttgtgtttcccctcaataccagcatctgattggctgaccagcaacgtgtctccaagaaatgaaagctgggttgggtgaagacaattttaatgtctcaaggggttaccttttcaaaataagactgcaccagaagactcctctcagccccagggcatccacttgctcccttgagaggacacattccatacctcgggtcatcctacgggagaaaataaaccagaagctgacattcactaggcactttagctgacagaaccatggcggatatctcggtttatccacagatagtactgaaacccaggaccaggaaaaaactaaagggtggctgaggacacatcaccccatagatttttccaaatcaaaaccttgacccaaaaacattctgataaatctctgtgcctagagaaggtaaaaggaaaagagacacagagattttctacaatacagtgtcagaggattagtctttgtttccttttcgtgggaaatatttacaagcggataacacatcttcttaaaagcgccatttaatgctttgtcaaaaacaattaattaaaatatggtataaacaagtacactaaaggacaaataggtgataatgtgaattaggaaggaaaagttgacatttgggaacgccagaagaaattggaaatttagtatcttactgcaagccagagtgaggctggagaaatgggggacgggggttagacttaacaacctgcttgggacacaggtgaaaaatgcagcagaaaatcagttccccgtggagtgtgaaaataattaagagacaggcaattccactgaggtgtctctagtccctgggttcctacttaaaaaaaaaaaaaatctaactcaggtgcattttttttttaattactacattcagagaaaatgtaggcttaaacaactataaactgttaattaacctctgattacacaaccaggaaatcttcacctgtattgtacaaatcaagaaactacgttactgtaaccaattactaaatttagttttcttcatcatacattttataaatgactttccttcaagcctctcccatagacaacaaactacaaaccatagctggatactctatgattcttgaatcactgtttgattaaattctttaggccaggcgcggtggctcacgcctgtaatcccagcactttaggaggccaaggcgggcggatcacgaggtcaggagttcaagaccagcctggccaacgaggtgaaaccccgtcccaactaaaaatacaaaaaaataaggccggcccagtgacaggcgcctgtaatcccagttactcgggaggctgagccaggagaatctccagaacccgggaggcggaggttgcagtgaggggagatcgcgccactaaaccctagcctgggcgacagagcgactccgtctcaaacaaacaaaaaaatcgttaatatttgtgcagtgactcccatacatttttaataggagaaaagaggaactgggaaagccacggaccaaagatcttcccattcatgaacccgcaccccgagtcaggattttcccctgacgaccctcccgtggtccctgcacaatctgagagagacgcggcgctgcgggtgcagagctgccaagagagggctccaggccaaggcacagtcactacgcagggaagagaaaggacgcctggggtcctggctgtcagcgcagccgccatcttatggccgaaggggacggaggccgagctgggcaaggcgcagattgtgaagctgactgcggagaggcctgagtcccgccacagctacttcccaccagttccaaccagccctttcgccgtctctcgggatgtcggaccgggcactctcaccatttctaggcttctagggggtcctggcgtcttagctgtggatctcccaatatctgcaggtcagagggccacacaggctaggcccctaggagcagaagacacagagaagtgagagcaaaacctggagctccggctacagcgagagacaaagaccccgccaaacccggaagccgtccagtccgctccagctgcatgcctgattggacggtttccagcccagcgtccctggttggataatgcttaaatccccgccctgtcaggctttgagtgacagaagatgtgatcagatgcgggttcaatgaagaaagagtgacagcctagactgccccctcttctgacagggcttcctccctcagctgagctaggcccatcccagagagtatttgcctttaaatttgtgtataaggtcatatgtataaataaataatacattatatagctatacacaagtgaaaagaatataacaattattttaaaatttcagcttttatgaccttcctggcttctggccctttgagcaggcagcctgagattttagaaaagagaaaatcatctaaaatgaatgtcagccacatgtggatttgaaattttctagtagccaaactttaaaaagaaacaagttgaactgattgttaacaatgtaattcacccattatattcaaaatattatcattttaatgtgtgagaaatatgtaattattgataaaatatataaatatttggaactaaatctttgaagctgactttgtattttacctttctagcatatcgcatttcagaccaggcacattgtgggaacccagtagccacacatggacaatagctgtcacattgaagtgcagctctgatgtcagcggtgtgaagggcctgaacatctctttcctgcgagagtgaaagaagagactctccctacaaacatctctctttggttcctagggtggaccagatagttcccatagaaagagctgagggcagtaggaataaaatagccacaggtaataaacaactgctggccacctgttgcccacctttcttttagagaccagatagtgaacaaaggatgatggggccacaggagaaaaaacaactatgtcttcagttctgtccacacacttgaactccagtatttagagatggagaaaatagattaaaaacaaacatagtttgctatatggtcttggccctaacaatcaggctgtgtttatctgttttctcctgtggtgtgggggactatgtgagtctaagcaccaatcacacgcatacatgtctacaggtatttctgcattacccaaaattctcttacaaaacatcgaactttaaatcaggggaagaaatcagtacctagagggtgtccactgttagaagccaactcttagtcaacctgtcactgaatcctggcaacttatctgtactgggtgcatgtattagttagctattgaggcataacaaatcatccaaaacttattagtttataattgaaatggttggccatttaggccgagctgagtggggccattcttctggtctcagctgagctccttcagacatgtatcatcacctgctttttgactagacagctgtgcatctgggggtgagcttctgctcctgggtctgtcaacaggggcaccttgcttctcctcttcatggtatcttattttccagctggctaacatgggcattattcatggagatggcagcattctaaaagaaaaagagaagcagtcaataccatttgagcctgggccccaaactggcccactgtcatgttcacaggtttctgttgacctgagcaaataaggtcagccagatatagggctttgaaaacagattccagatcttgatggaaacagctgtaaaagcacctggttatgggcaaagatacaagagggatgaaaaaatgtcattttgcaatcagtatcattctaccttttttgcatatgtggtatatagaactcttccacatcaggaaacttgtgcaaagtcctacggctactaagtggctgggctgagactcaggatcaactttatctgactccaaagcccatgcacctccatagatgacactactaaagtagctgccctgccctagactattgaaatcctggagagtgacacttccatagtagaagtcagattccttttagatttgtgctcatttgggaataatcctcacaaaaattgcagaagcacacggtggctctcacctgtatttttagtactttgggaggctgatatgggagatttatgtgagcttaggagttccaatgcagcctgatcaacataataagattctgtttccatgacaaaaatgaagaaattagccacccatggtggtgcatgcctatagtcccagatacttaggtggccgaggcaggaggattgcttaagcctggaaagtcaaggctgcagtgagctatgagtagttacaccactgcaatcaagactgggtgacagagtgagtccctgtctcaaaaaaaaaaaaagaaagaaaaaaattggagaagcattttgaaaagatataaaataatttggggaaataactgaaggatgagtttagaaaatcaaagaccaacaacacattatttatttttcatcatagaaaatagttgaaatccattaaaaggaaaaatctttagagaaattaataaattttttaaatttattttttatttttgagatggagtctcgctctgtcacccaggctggagcacagcagtgcgatcttggctcactgcaacctcggcctccccagttcaagcgattctcctgcctcagccttctgagtacctggattataggcatccgccaccacgaccagctaatttttgtatttttagtagagacggggttttaccatgttggtcaggctgctctcgaattcctgacctcgtgatctgcccaccttgtcctcccaaagtgctgggattacaggcgtgagcagcagagtccaattgagcatggaatgatttgcagattgggtagcctgtggatccagagtaggcgcagagagactctagcacagccacatgatgaaaacagattgatagacagcaaaagcaaagtgacatacagaaaatgaaagtgaggtacagaaacagccagattgattacaggttgggatttgccttatttaatcatgatttgaacacttgatgttcttttattggcagaagcacagtggttggtacaataatgggttacagtctatttatatatccagttaggtttcagtttactatgtacaaaaaaacctagtgaccaaagttaaacaggaaagggtgcagctttagagataattaatttaacaatttctcccttttggtcacgttctcaattttgagagatagaccaaaactttagacattgatattactctgtcaccatcaaaagtgtacttatttagtctcaaatcccactatgaaatagcagaactgtgggttttaaaagtggaaacaaggacttcacgttatttgttttttagggttgcagtagaggggaccatcttgtatcgaaatctgctgtttccaaaataaaaataaaacctaccctgttttaagatctacctatttacttaaatttttaatttgattatttcacatttagcatgagtgactccatttactttgatttggtctgtttgggcctagtgcacaaggtcagtccagaataatggcctccaataattttgtttaaaaattttccaccttttggttaagttctcaaataggtcagagtgtgactaaaactcagggtcttagtgtcactctcagtttctattatttttggtttttgtttttatcagttcattcataggttatggtgtcctcatggtcacgtatgtatttgactttttgtggttccagttaaagagagactatttcacattctagagataactgcatgcaaacttcaataacttttgagagaatacagtgcagtagggagactactattttgactatctgggggtaataaccaaaagtttcaagtatgctttttagtcagggtcccatgaacccaccaactaaaattaaatagatcaaataattagctacataaatgttctcctcatttcaaacaagcagcctattcactaatctcctacaactgaatctctgtaatacctggtgaatttctctatgtgcaactataagtattagcaacttcacagatacttctctgtttatccagtaaataatctagagaaattctattatttaccacaattttactaagaaaaattaaagtctattgtgtaaccatagcctttacaatagaatttgctatagagccctattatggggaataaatttctttttttctttttttcttttttttttccgagacagagtctcactctgttgcccaggctggagtgcagtggcatgatctcagctcactgcaacctctgcctccaggttcaagcgattcttctgcctcagcctccccagtagctggcattacaggcacacgccaccacgccctactaatttttgtatttttagtagagatggggtttcaccatgtcggccaggctggtctcaaactcctgacctggtgatctgcctgcctcggcctcccaaagtgctgagattacaggcatgagacactgcgccagcatagggaataaatttttaaccattgcctcatttactctaaaccatgggggaaaaaaagacctaacaagtgatacccattaagaagagtactggcctcctggcaacactctgtaatctattctgaataagttctctttaacttataaggtaggttaagagcagtggacaaatattccatttttgatattatgaggcaacagatgtcctattaaaaattctcaccaggccgggtgcagtggctcacgcctgtaatctcagcactttgggaggctgaggcgggcagatcacgaggtcaggagatcgagaccatcacggccaacatggtgaaaccctgtctctactaaaaatacaaaacttagctgggtgtgatggcatgtgcctgtaatcccagctattcagcaggctgaggcaggagaatcatttgaaccatggagtcggaggttgcagtgagctgagatcacaccactgcactccagcctgggcaacagagtgagactccatctcaaaaaaaaaaaaaaatctctcccatattggcccttcgtcttttacctatcaaggcataagtttgcccatatagaaggttggctgcaaaatcattttcatgtaaaagtgtagctcatgaaggcacacaagtgaccccttttttatttctgtcatttggagagccataagaaaaaaacagtggactaagagtgtcgtaatagcagagatgtctttcttgatttttttatcttgttaaaaaaaaagctatctatgttaatgttaccatctgcttttgaggagaagcttccctgcttagctttactttaagatctccaatgggtatacaattgcaagtttggaggggcccttctgagtcatgagattatcaaaccaaggtttaaagtcctgaagtcttgctgcagtgtagatggcaggcagactcaatctctctggtttctaaattataaagggttttatagtattccatcagtaaaccattaaaagcattctttacctagtgaaaatatgctttgccgtaatgcattaaagctttgctgcatttagtcatattagacttcagtagcagaagatacatgaggttcttttatcaggtgcataagccttccaatgactattttacaatcgtcaacacattttttcactctcagttaacctgattgtcatcaatctgcaactacaaaagcaattctgtcaatttagttaactttgctcaatattactgtttctgtaataccttatttaacagttttataacatgtctagtaaaataagtatccctattattggagactttttaagaaatgtttcacgagcaaaacatatttcctaatattattttggctactgttataacatcaaactttttgcatgagaaaacttttttttttttttgagatggagttttgctcatgttgcccaggctagagtgcaatggcacgatctcggctcaccacaacctctgcctcctgggttcaagcgattctcctgcctcagtctcccaagtaactgggattgcaggtatgtgccaccatgccctgctaattttgtatttttagtagagacagggtttctccatgttggtcaggctggtcttgaactcccgacctcaggtgatccacccacctcggcctcccaaagtactgggattacaggcgtgagccaccatgcccggcctgagaaaacttttattctacagacatgaattaaaaatgacaattaaataaaatttctttcctttttttttttttttaaagcagaacctcgctctgtcacccaggctgcagtgcagtggcataatctcagctcactgcaacctctgcctcctgggttcaagcgattctcctgcctcagcctcctgagtagctgggattacaggtgggtgccaccatgtccagctattttgtatttttagtagagacagagtttcaccatgttggccaggctggtctcgaactcctgacctcaagagatctactcacctctgcctcccaaagtgctgggattacaggagtgagccactgcacccggcctaaaatttctttacaaatgtttaaatagcccattgggtagcagaaatgtacatgaagttttgattgtcttctcgggattctgtttgacaaaaaaaaaaaattggtcctaacctattttagtaattagaataatcaccaaacacacacacacacatacacacacacacactcaatttatatttagcttaatttattttttatctcttctgtgatgagtaattaaatgcagtgattttgatagaggaaactttaagaactcagaaataaacaagtggctgttggctgtctaggttctccatgagtccacacacaacattaaatttatgtcctcttcaatatctggtttgtttcttcaattcaggtgcatagcactgataactgagaagttatcatacataatttgacttgtaccacagagtttattcaaacggcatatctaaaacaattttagtactggctaatttagtataaaaatgtggtagagtattttcatgatgttcaattaatttttgttttgcctggattagtagtttcataagagtcattctcttcattagaattctcacaattcttacccagtctaaacagtttgattgtaaaattatcagaaacttgtactcaacttgtctgggtcctttccatcttttcataaaactatgctaaaattaattcattaactgtggaaataacttaaaatagttataaagaaacaaatgaaaaaattgattttatctgtgtcctacaataacctatcataataaccataattatgactaatagcatatactcagaaatttcatacaattttcaaataaatgctaatagcacttattaaaatataagttgaaggtcagacatcatttttaatgttatgatgccttccatgtaacttaacatatcaaataattctgatgattactcttctggatgttgcattagccctctgcagcatctaaaagttaagggtcaaagaaaagacaattattaagcggaaatttcattctggaaaacctgtcaaatatgtcaaagggttaaaacacttgaccagatatataaaaattggctctccctctccctctccctctccctctccctctccatcaccctgtccctctccccacggtctccctctccctctctttccacggtctccctctgatgccgagccaaagctggactgtactgctgccatctcggctcactgcaacctccctgcctgattctcctgcctcagcctgccgagtgcctgcgattgcaggcgcgcgccgccacacctgactgtttttcatatttttttggtggagacggggtttcgctgtgttggccgggctggtctccagctcctaaccgtgagtgatccgccagcctcggcctcccgaggtgccgggattgcagacggagtctcgttcactcagtgctcaatggtgcccaggctggggtgcagtggcatgatctcggctcgctacaacctccacctcccagccgcctgccttggcctcccaaagtgccgagattgcagcctctacccggccaccaccccgtctgggaagtgaggagcgtctctgcctggccgcccatcgtctgggatgtgaggagcccctctgcctggctgcccagtctggaaagtgaggagcatctctgcccggccgccatcctgtctaggaagtgaggaacgtctctgcccggccgcccatcgtctgggatgaagtgagaagcgtctctgcccggctgcccatcgtctgagatgtggggagcgcctctgccccgccgccccgtctgggatgtgaggagtgcctctgcccggccgcgaccccgtctgggaggtgaggagcgtctctgcccggccgccccgtctgagaagtgaagagaccctccgcccggcagccgccccatctgggaagtgaggagcgtctccgcccagcagccaccccgtccgggagggaggtggggggggtcagctccctgcccggccagccgtgccatccaggaggtgaggggcacctctgcccggccgcccctactgggaagtgaggagcccctctgcccggccaccaccccgtctgggaggtgtacccaacagctcattgagaacgggccatgatgacaatggcggttttgtggaatagaaaagggggaaaggtggggaaaagattgagaaatcggatggttgccgtgtctgtgtagaaagaggtagacatgggagacttttcattttgttctgtactaagaaaaattcttctgccttgggatcctgttgatctatgaccttacccccaaccctgtgctctctgaaacatgtgctgtgtccactcagggttaaatggattaagggcggtgcaagatgtgctttgttaaacagatgcttgaaggcagcaggctcgttaagagtcatcaccactccctagtctcaagtacccagggacacaaacactgcggaaggccgcagggtcctctgcctaggaaaaccagagacctttgttcacttgtttatctgctgaccttccctccactattgtcctatgaccctgccaaatccccctctgcgagaaacacccaagaatgatcaataaagaaaaaaaaaaaagaaaaaaaaaaaaaacacttgaccaaaatagaaccacaagttctcataaaataatagtcacttatttagccaaagtgataattaaaagattaaaaaaaaaaaccaccaaaatcttgggctgggtgcagtggttcatgcctgtaatcccagcactttgggaggccaaggcaggtggaccacaaggtcaggagtttgagaccagcctggccaatatggtgaaaccccatctctactaaaaataccacaattagccaggagtggtggtgggtgcctgtaatcccagcactttgggaggccaaggcaggtggaccacaaggtcaggagtttgagaccagcctggccaatatggtgaaaccccatctctactaaaaataccacaattagccaggagtggtggtgggtgcctgtaatcccagctacttgggaggctgaggcaggaaaatcgcttgaacctgggaggtggagattgcaccactgcactccagcgtgggtgacagagtgagactcccgcctcagaaaaaaataaaataaataatcttttattgtttgatacaggagattcagtttttcaatcaaaagacctgaaaaagccagcatgagaaaagtcctattttttctgtttttccttttcaatttattcagaagatgaacaaaaatattttcctgtgtcatattaataatacatacactttttgttcaggattaaatcagcttttacatttttggagcctctgatgttaaatccttgatggcaaaaggagattgatctgactcaaacatggacctctgtggttcctctttctacaataaacatgagtctcaaaaagaggccacaaataggtcaaagtctcctaaaacacaaacttaaaacttttacagtaataataacatcactattgaaacatgcaaacaaccacaaaagatacaagtataagacatttacaggatagcctcaaatatagtatctgaaaatattacagaaggcatggaaattttaattaaaaataaaaattctttattttaaagttataaaaatgtgaaatcttatcattatgaataaatccacagtcagaatggtggcatgaagaccccagggcacagctgctatgtttggaagtttagtcctgtgcctttgaagacctcccaaaacccttgcccaaaattgcagccaagagcgccttccagggagcacataagaacccccacaatcccagatgctagcttggaaacaggaccctgttcctggaaaaagaagctgcctgtagaaacatggggagctgctgaaatcctgacccttacactatttcctctgcctgatctcattgcaggtggccatgttcccctggcagtggcagcagcaggctccaggctgggcaaagggtgggagcaggcaaaagatgtgcgtacagccctcacgatgagtgggtactgttagtggcatttctggggcagagcctggccccatgggaaacttcagcaaactcaagggtctgtgtcctgcataacctgctgtgttcccttgtggctccccccatatcagggaccagcagcagccatgggcctgctggctgaggccccactggctaccccttcactgccttcatttattccagcctcttagagcttcagggctgaagaaagtggatgtggcaaatgctacgtggtacagtatacattatttactctctgctttcttataaaaagtttgccaatacctgttcttgagaagtcattaaaaaaaaaccctctatattcttagagttatatttaataaagtaaatttttaaaaaatgtttcacttgaaataaacttttttgggtaaaggtaaaactgtgtccattactctcagtcatcttggttagaataaaccctgagacaccaagcatccaattattaatgccctggaaatgggaatccacctgctgcctttttttctgtaacaaatatcaaattagttcaactagaatatgtcactcattaaaattagcatcaaactagaccatctgacagagattttttcctgccttaaaatggggtatcttaagctataaaaacatatactttgaatcttggtttgtagacatccctcgtgactatggcagtgtttctgatcaagggagcctccacgggaatgcaaccctaagtggttctttaactctcccacagctggttatttagaatcctcacattttgggtaaataccgtaattttaggctcattgaaatttaaactcttgaatcttttcagtgccagactttgtatctatattttacgaactttagtccttttactctgggcatttacaagcaggcaaattttgtcagagaaaaaacagccatattttagctaaatacacattgtcaacatggcaaacagcaaaaggcttacttttaaggtattttggtgtgacttgcttagtgaatctaataaaatagaagcctatctaagtaatgaattcaggggtagttcaaccagaatttttatatatgtacaaatgtttctggtaaagcaaagatattttagagtaacttacagacatttaagaatattgggcttgagcctgggcgcagtggctcacgcctgtaatcccagcactttgggaggccgaggcggccggatcacctgaggtcgggagttcaagaccagcctggccaacaacatggtgaaactccgtctctagaaaaatacaaaaattagccaggcatggtggtgggtgcctgtaatcccagctactctggaggctgaggcaggagaatcgcttgaacccgggagagggaggttgtggtgagccgagattgtgccattgcactccagcttgggcaataagagcaaaactccatctcaaaaaaaaaaaaaaaagaatattaggtttgtataattttttcttatattgttttatctttagatttttagtggtttgattatgatatgcctaagatgtgctttaatttgtattttccttgtcaggttgttaatcttcttagatcaacataataaggttttaccaattgctaaagttttcagctattagttgttgatgtacttttctatcccatgtaattttttttcttgttttttgtttgtatatttgtttgtttgtttgtgacagaatctccctctgtcacccaggctgcagtgctgtggtgagatcttggctcactgcaacctctgcctcccgggttcaagtgagtctcatacctcagcctcccaagtagctgggattacagaggcccgcgaccacgcccagctaatttttgtatttttagtagagacggggttttgccatattggccaggctggtcctcgaactcctgacctcaggtgatctgcccacctcagcctcccagagtgctgggattacaggcatgagccacctgagatactctgtctcaaaaaaaaaaaaaaaaaaaaaaaaaaaaaaaaaaaagattgcaggccgggcgttggggctcaggcctgtaatcccagcactttgggaggccgaggcaggtggatcacttgaggccaggagttcgagatcagcctagccaacatggtgaaaccctgtctctactaaaaaataataataataataatacaaaaattagctgaatgtggaggtgtgcacctgtaatctcagcaacttgggaggctggtgaaagagaatggcttgtacccgggagggggaggttgcagtgagcctagatcacgccattgcactccagcctgggcaacagagtgagactctgtctcaaaaaaaaaaaaaaattacataccataatcaagtaatattttttcacaaaataagtgttggcttaatatttaataaatattctctaacatattacaaaatattatttgcccccattttctgcatctgctcaccctgttcagaacccaaggtgccatgctgcttctgcatctctaagaagccaggtgcccgaccatgagaactaggaggaagggagttgaaggagccagaataggaggcgtgctgtggaagcaggagtgaccagacctccaggcacaggatacccaggacagaggggacagcagggctgggagctccatgggtcaggcaataacaggtgccagaagttgccaccatttcacacctcaggcaggggcactggggcaaatctgaaggcactcacggactgggtgctccagaaatggacaaagcagtagctccagcttggcattgcatggccattatcatgaccaaacaatggggagaaaaactgactctccaacaaatggttcagaaaactcaatatttaaattaaaaaaaaaaaaaaaaagctctctttctctgaacattatacagaaaaagcctatgtatgcaaagcaggaactagaagtaatatttgcacacccatggttataacagtattataagagccccaatatatatatgactgatgctgccatctgtgtcctcacagtgatgcaatgacagcatcctgtgtacacacacagagctaataccatgaattcactcactgagcccatgacttaatctgaaacctagacaactggtactgaaattctccccgctcagtgaatccatagggaatcacttgactttaatatcttgttgggtttgggtttgcatgcaatagcttaagaagtctttttttttttttttttttctttttgctatttcataggactttttcagaatgtggaaaacaaaaacaaatccagaagactttcccactgtctgctacctttgccccagactatcttaaacttatatgcttatattttattaaacaaaacaggtgctctctacaatctctgtgataattatgaggtatttgaagcaagatataaagagtggtttcatgttttaacttaatcttttttgaggttggaatggttcactttaatgaaagattttttgttttaatgttctctgttgttttaaaatgtgaacttgtgcacacatgtgcagactcaatgttcttgctaaaaacataaactacataattaatataaacaacataatacacataattaataaatatataaacaacataataaataaatactaatataaagattcttatagtcactaggccttctttttttcttttcttttttttctcttttttttttttttgtttttgagacggagtttcgctctgtcgcccaggctggagtgcagtggtgcgaccttggctcactgcaatctccgcctcaagggttgaagcgattctcccgcctcaacctcctgagtagctaggattacaggtgcctgccaccatgcatggctaatttttgtatttttagtagagacggagtttcaccatattggtcaggctggtcttgaactgacctcaggcgatctgcccgcctcggcctcccaaagtactaagattacaggcgtgagccactgcgcctggcctttctttctttctttttttttttttgagatggagttttgctcttgttgcccaggctggagtgcaatggcttgatctcggatcaccgaaacctccacctcctgggttcaagcaattctcctgcctcagcctcctgagtagctgggactacaggcgcccaccaccatgcctggctaattttgtgtttttagtattttgtatattaggggtttctccgtgttggtcaggctggtctcaaactcctgaactcaggtgttcgatacaggcgtgacccaccatgcccagccaccagtccgtgttattgttaagtgtcagtgggcatcagttgctaaagtttgtaatacttgctgagtcagttcaagccatattttgtcatctaatctctcataagctgaccccttatttttggcattattcctgttgattcctagtgttgaccattgacctccacctattcaaacttactgtggccagtggacagaaagacattcagtgctctggacatagagtgtttcactaatcttaccttccataattcagtctatagaagattagaaataaggcttccttccttattcaagagaatgctttcatgtgcactcttgattttctgtcagtaagggcagataagtacacacagtcttcagtcatatatattaaaaaaaaaaaaaaaaaaaactagagggcgggcgcagtggctcacgcctgtaatcgcagaactttgggaggccgaggcgggcggatcacgaggtcaggagatcgagaccatcctgactaacacagtgaaaccccgtctctactaaaaatacaaaaaattagccgggcgtggtggtgggcacctgtagtcccagctactgaggaggctgaggcaggagaatgctgtgaacctgggaggtggagctcgtagtgagccgagatcgcaccactgcactccagcctgggcgacaaagcgagactccatctcaaaaaaaaaaaaaaaaaaaaaaaaggaaaaaattaaaaaaataaggcacccaagaccatacaaaaatgggaattttctaagtctatacgaaatacatttcctataattgctgagcttttatttatttatttatttttgagacgaagtctcgctctgtcgcccaggctgaagtgcaatggtgcggtctcagctcattgcaacctccgtctgccgggttcaagcgattcttctgcctcagcctcctcagtagctgggattacaggcatgcaccactgtgccaggctaatttttgtatttttagtagagatggggtttcaccatgttggccaggatggtctcgatttcttgacctcgtgatctgcctgcctcggcctcccaaagtgctgggattacaagtgtgagccaccgcgccccatctacagtacttttttagagtaaaatttgaaatacataattatctcgagattaacgtagaatttaatagattatctaatagtcctgactaattttagtagttctagctctattcttactgaattttattaccttatagtccctaaataagccaactttaagagaaatatagtaaacttcctagattttgagaaatgtttgagtcattacctgatgcaaataatagacatagacatgaacgagttacaaaagaggaataatatttttgatgtgcataaaaactttttaaaactgaatcttttagtactctctctatgtagatgagtctaggaaacagaataggaactaataaattgcaattttctgcagtggaagatatctgcaatcactagaagcaactgaatcagaaaagctgaaatggcctgcggcaacctcagaaagcaaaaaacaggcttgtgtggacagaatgcatactcactaatagcagaatgacagagagattactttttaatgaatatctgtgacattaattcttttgcatcagaacttgattttcattctaaactttcccactatgcaaacatgtatatacaaacaggcacacacacatcctcacattcttacactcatgcaaattcaaccagattttctgcagccaggatatctttaagtacaccagattaaactagataatttagggattatctgaacccaccagagcaattgcttgtttactttctctgtaaatgtaacatcagtatttcctagatgtcccactgatatcttaattacaactttctgataaactactagtgagaaagaatttgaaacagaccctttttctagacatattttatgactctaaaatttatttctattatagaatatagaagacattaacttatttggcaaaaaagaatcacaagtcacaaacttgcaaaaattaaattaatggtgcagataaagttgtaaaattaaattaatgatgcagataaagttgttaaatatctgaaattactagaattgaattccagaaacccctgacatctaagttaatatatcaaaaaggttaaataatttaaacaatttatattcctggataacaccttgatttctagtgtctttaaattattaaaaacatttcagccaagtatggtggctcacacctgtaatcccggcacttgggggggctgaggtaggtgcatcacctgaggtcgggagttggagaccagcctgaccaacatggagaaaccttgtttctactaaaaatacaaaaaattagccaggcttggtgatgcatgactgtaatcccagctacttgggaggctgaggcaggagaatcacttgaacctgggaggcggagatggtggtgagctgagatcacgccattgcattccagcctgggcaacaagagcaaaactccgtctcaaaaaaaaaaaaaaaagaaaaaaaagataccatttctttgtaagtctggctctgttttcaaagtgaatattgttgtaaatcatttatattcttctcctcaaatgctttacttcccatttttgtcttagggaatctgagcatatcttgaaaaaaaggtctatgggaacaatgaccctaccagaggtttcttatggtttcgcacagttttgtgattaaggaagggaatgatcttagcaaaatggcagaaacattgacaattcaaaactgatactgaaaggcatatttccaggtggaaatgcaagacagaagtagaatgattgagaatgtggaaaacagcacttgcatagaatgctgttttgagctttaagtgtaaagaattcctgctttgaatcattaagggatttttacgttattcatctggtgtaaaacacaacacagataaagagagtcagtaaatggaaggttgtttttattttaccaaaatcttatattattttctaatattaatttacttagttcctgacaactaaataactattttgtgcaatgaatggtatttaatgttgatgggtgcaaagcttaagacaaagaacaaggaacaaaaatttctgcagcttgttactatttacaaagcacaaaattcaaatgcatttttaaatttaatactcaaacaaccttataaaattcttttttttttttttagacggagtctcactctgtcgcccaggctggagtgcagtggcgtgatctccgctcactgcaagctccgcctccctggttcacgctattctcctgtctcagcctccccagtagctgggactacaggcgcccaccaccatgcccagctaattttttttttgtattattaatagaggcaaggtttcaccatgttagccaggatggtctcgatctcctgacctcatgatccacctgcctcagcttcccaaagtgatgggattacaggcgggagccaccatgcccagccataaaattcttaataaactctttattctatttttttttttcacatggagtcttgctctgtcgcccaggctggagtgcagtggcgtgatcttggcaaactgcaatctctgcctcccaggttcaagggattctcctgcctcaaccacctgagtagctgaggttacaggcacgtaccaccacacccagctaatttttgtatttttagtagaaacagggtttcaccatgttggtcagggtgttctcaaactcctgacctcatgatacccctgcctcgacctcccaaagttctgagtctgttactgaactcgatccctggtggactgaagaaaggagggtgaatgtggaaagaaagacaaagacaaaagagtatgtttgaaagaaggggtcgggggcaccttgtctctagtagacaagggcccagattttccacagcccttcgtatttattggtaaaagagatagtgagaagggggatggaagaagaggtcatttgctcagtccagagtaggcctgcaagactgcattccttgaacaataggctctagatgtcccagtagataacctcaaggagcccagtgccagggagtgaccaccctcagcaaaccttctggtggcaggcgcagttgtgagtttgctcacatcctccattcatgacaaacagcttgctgtttgatcatatggcctctagtggaatgctgagttggtcacaatccctttggcctttttggctctcaacctctcccactttgtgtttatgtattaattaaaacaatgtaaggccagggtgggcagctctcattttccaattggcgttccatctgattttacagactgtgaacagaagacagagacaaaacaacattattccaagaactacatacaagatgttagttaacgtggtgctttagatagttccaagggttgaggctctccaggccttgctggaattcagtccagtcttctaaagaaggctgaaactcttgagtttgcctatttaaataagaattttgttttgtaattcaccaatatcaaaggtgatgttggatgtgaaagctccctgcaaatgggctttcacaaggccccatggatactcactttggttatattctaagttggttacacaaacatgagtgtgactaaaatgacaacgcaattgctcctgcaattgtaagctttgtacttgttctcctaaccatagaaccatgaattttaacattgccacttcagtttgaaactcagtgttaattttattctgaagtagccatgcttggtcagctgtgcgcgtccagttctccacatactgagcagtttgaatagaactatgcaaagctacagaggacatcacaacagaagttattagtgtgaccaaggaaacaatagtgaaaattatcatgcctaaggctctatggacatgatgagtaagctgagttagaagaagcttcacaaaatgcaaaggaggtgtgagaatacaaggcttggacagactgacaggaatccatagcccagggatgcgatctaaaatcatcaaagtagagacactgtgtgtttgcaatgtgctatgattaatgcagtgatataattggcaagatttacaggtcagttgggtattgtttacctggagctggtccttcttagctgccaaaaaaacgtgaagattaaaaacacaaactgtagaccaggcacaatggctcacacttgtaatcccagcactttgggaggccgaggcaggtggatcacaaggtcaggagttcaagaccagcctggccaacatagtgaaatccaatctctactaaaaatacaaaaattagctgggtgtggtggcacatgcctgtagtcctggctactcgggaggctgaggtgggagaaccacttgaacccaggaggcagaggttgcagtgagctgaaaccatgccattgcactccagcctgggtgacagagtgagactctgtctcaaaaaaaatgaaaactaacaaaaaaacaaaaaaaaaaactgtaaattgagtggtgatattctttacaaatgcaacattaagactgtgtcatttactattgctattattggataatataccaacccagatgttgccattcataaatgggagtgctgccttccatatcgtctctcgaattggtcctttcctccctagataatgccgctgaggaagagatgggctaaagcctgctccatgccaagcaatctgggtggcagatggattggattccagtgttgtataaagaagaagcattaaaagcttgccatcaatgccagcaaagtttgtgccatgatttccgattttcatcttttccatctaactgaactttaggtccccaatccataatgtctccagttaacatagattgttttctaggcactgggccaagacactgggtccaaggaggggggtaggaactattgaagggaatccattctgtagagcagcacaattaggacaattgggctgggaatggttggttagcacaccagttacattaatagaactaagacttaataaggacatgatttttctatagtgactcaaccatatttgagcttgaattgtaagacacctatggctgagtgacatctttgtggtgatacacatgagaagtccttccagtggagcgatataattaatgacattattctgagagtctaactgttctatgtcagggggagttaggggtcctgaagcccatgctccttgatcatgataaatctcaggaggagtgtcactccaaagtataggttgtactgctggggaattgggaagatatgcacgatatgtttttgcctctgcacatggaaaacataccgcacaggacattatggctaacatggccatgaacatgtaattaggggtttttgtctggttttgatgctccacttgtttctcagcttcctgcatggttttcttgagttgcccccaagttattgggttgatgtcgtcgtgactctagtcagccttctccctgtcttcacactcaggctcagctggctcatggctcataccaaggggcgaagcccatggttggccaccctgggttcctccagtctcccattccatggtctcatgcaccttgagggcatccacacggtttgtccatctcctgtaaaaacacgagtataaccttgtcttctcatcagtaaatccactggatctttccattgtccttcttctggggatttccataaaacttttggataaactttcctcttttcctctaacacttgccaatgtctttctgctggagccttaccatctgtaccagaagtcaaaaaatttaaagtaaataaggctaaatgtagttttgactgaggtggtagttggcctcctataccccctttttgtgttttcaacatgtgttgtaatgtttgatgtgcccactttataatgccttgtcctctaggattataaggaattcttgttttatgggttatagctcaaagctgtaagaaattttgaaaagcatgactagtataagcaggtccattgtcagtttttaattgtttatgtatccccatatgaacaaaggatgacaatgtcactgtacatgaccaattgtctcacctgtttggcatgtatcatgcagcatatgagaataagtgtctatagtcacagaaatatagctaagcttaccaaagtttgctatgtgtgtaacatccatttgccaaatttcatttggagccaaacatcatgggttacagccttctacaggtgtggctccggggacatgctggcaaataggacaggcttgtattatagccctagcttggctgcgagataaatggaacatgtgagtaagggcggaagtattttcgtgcagtagcgcttgctgaaacacagaaccaatcaatttatctgctttatcatttcctaaggataatggtccaggaagttgtgtgtgagaacaaacatgagaaatatgaaaaggagctgcacaagaataaatatcatgttgaaatcttaaaaataaattaagcagttccaggtctagtgtacttttaattgtagcagtttctatgcaactggctacatttacaacataagctgaatcacagaaaatgttgataggatctgaagctgtgagctgtaaaacctgaatgactgcaattaactctgagcattgagctgaaaccccagaggtcattaatggttcagtatgtttaggtccatagacagtggcacagcctttggaacagccatcagtaaaataattctggccacctggaataggcttgtgatgagtaatcacaggaagaatgaaagaatgcattttataaaactgcaaaattttgtctgagggataatgatttttctattattcccacaaagtctgcaaaagcaatttgccatgcaattgacatttcccaagctgtggcctgttgctgggagtctaaaggaacaataattttgtcagggtgatatcccgtaagcatttttgacctatgcctgcccctagtcaccatttgtgtaattaaagaaagataaacttgcaaggtactgatggtttgattaggtagaaagagccattctattactgttacagacttgtctatgaactggcccaaaagtcctactagagagtggggggtaggaagaataaacaaaagcaaaggtttttgcagttgtagctgtgaggcatgtctctgctgtaacatttgctctacaagccataactcagcgtcttgcctctttagttaattgccttggggaatttaaagaagaatctccttgcagggtttggtaaagatgtgtaagttgataggtaccaatacctaacattgggcatagccaattaatatctcctaataattgttgaaaatcatttaaagtctataacctgtctttacaaagaactactttctgaggccatacactcctctctgtaacaatagttcctaagtattggtatggagaagttgttcgtaccttctctggagcaattttgagattccaattaacaagagctcactttacttctctgaataattgatgcaatacttgatctgtaggagtggccaaaagaatatcatccataaaatgaatgatgtaagcagtaggaaacatattccgaggctcctttaatgcctgtcctacaaaatgctgacatagcacaggactgttaagcatgccttggggtaaaactctccattgataatgagaaacaggttctctttgattaatagaaggcacggagaaggcaaatcgaggcttatccttctcgtgtaagtgtatggtaaagaaacaatccttaagatacattaatagcctctggagatggtacacctttctgtaaggtgcccatcggtttaatttttgcattaatagttctcaaatcttacagcagtcgccatcttccggacctttttggaataaggtcctgtatccaattgttcttttactagctgctgatgttgcatcagcttctcctgagataggggccattgatccacccatatgggtttgtcactaagccattctaatggtaaagcagagggtggaggagaaatatcaatgacccccatcagaaatcctgacattctagcccttttctatctgtttttccagttattgatatcgggttagggtttccttgtaggaacctccccaaaccttttcctttctgatatcccatgttcttcaacattttaaatcctgggtcatcaaagttttcatttgtaagtctcatatcccatgctgtaagtctcaaccccataaattgatagctatatttgcaacatagggctgaaaagtacatgactgtccatccagaccaagacaaggtaaaatctcagcactgtgttgaacactttgagctgtttctactcccactagggatgtagaagttaattgcaagggccaggatgggagccatttgtctttagatattactgacacatcagctcctgtatccataagcgcataaaatttatttcctttaatttatactacacaggtgagtctattagaggctagggttggcttagatagatttcccaggtgattgtgcttcccaaaacctttatttcctcatttctcctttcatggagaagggtgtaatttatagggaataagcaataattgagcaatatgttctcctggttcaaaagcccaaagatcttgtgacattaaaactacttgaatttctccttcataatcagagtcaacaactcctgggactacactaatgccctgtaagttaagacggcttttgcctaaaattagtcccatgtatcctgctggtgaaggtctccaaatgccagtgggattcttggtgggtttgtcttccccaactaatgtaaccctttctctggccatgagatctaatcctgcacttcctggtgttcctggggtgagggaatcaatgtgcctccgggaacatcttgtgtgatagaaacctaagctcttagggtatggtctcacagttggcaacataactgattcttttaagggtatgttttggatgatgcgggcaatcacaagaccaagaaatcttacaggctgcagcctattgtgacacttctcttttggaaaataaactctgtcatcagtggcaataatatgtacaaaatcaggacagagaataaagactcagcaaatgcaactaatttgatgcaaggagaagcataatagaggaacatcagtattcaaatgtgtgtcaattctagtgataaaattttttttacaacctctaggaaaaaatggaaagaatattactacaattctaccaggaatttgatgggtctaatcaaggtagctcacctttccaggatttcagcattggtaattattggcagtcttggtgctcatttgcatcagtggccagtatcagtgaaggaaagtccatgagttcttgaactcatggaaaatcttctccctcctaccatgtccacattgtcttccatggacccattaagcaaacattgtgaaaggtatggaaaaagtctaatatccaaagcccagtcatccatttggccatatatatatatacacacatattttttgtttgtttgtttgttttgagatggagtcttgctctgtcaccaggctggagtgcagtggcgccatcttggctcactacaacctccgactccctgattcaagcaattctcctgcctcagcctccaaagtagctaagattacaggcacgcaccaccacgaccagctaaattttgtatttttattagagacagagtctcaacatgttggccaggattgtctctatctcctgaactcatgatccacctgcctcagcctcccaaagtgctgggattacaggcgtgaacaactgcacctggccctattagccctattattggtagcttctcatactcacaaaaagcattcacataggaaacaaatattcccatgttcattccaactggtcaatcatatacctcattgcagactcattattgctgaatcttttgtttatatcaaagtctacagttccagacttatggccattagcaataaatacatgcagatgcctatctctaaatgatgtaaacaaaaactatatgttgttcaaatttctgccatttggaaagctatcttttccccaggtttttttttttttttcagggccaaataactaccagcttaaattatactggaaatagcatattgtacagaatcatctgtggataggtaaattatttcccccattggttacctgttaataagaaacaccaatagggcctcagttgtgggttgaaaggtggcaatgcatggaggtaggtgccatggaggtctgagtcacctctacatgcaacctttttgtgcccatagcacgtgcttcagcttgatggcctatagaccagtgttccttacttgtctacagcaactgtgtataccatgctattttccagtagatctcataacatgcaattcataatggatatttcaggtcttgttacatcatatcccatgatcagttgttcaatctctaaagaagtgcagtggcaagccaagacctatttccaatacatttgtcaaaactagatttttttttacatccctggaattctgtactgtggttgtcagttgggcttgccaactgtcagttctgcagtaggtcacagcaccgtgacctgctgcagatgcttcagctccatcctgtgtcctctactgcagagctgccttccctccagccacaccagctgcagaactgcctcttgctctgggcttcagtaaagataggcagctttctgggtcactctgtacatgtgttgaagcagcattctcaaatgtggcatattttgtctccaaaatataaagagattaacaatggttgtgccccttttgcagaaataggtgatttcagttccatgagcttttcttacatgttgaataggctgtcttgacaatctgcagaccagagcccctagagattgacctggtgcattaatctctgcagtggcaaaccaagcaaattcagttgagctataacagaaattcagatctttagtctaatgtcagagcagcagaagtgatgtgttcttcactctgtctggaatgctcttatctgaaatacagacatggctcttttatttattttgggtcactgttcagattttctgagcctgagactttcatttagaaaatgacacaccactatcactctccaagtcttttactttgctttttgcttttcttatataatcatatgggtgggtggtgtatatatagatatttattgtgtgtatataaatttatatataaatatctatatatacacacacacatatcaatttgctgtggttatttatttacattcttgtcaccccaaaataaaaattctttttacatagaaacctaagtgtattttaattttgttctacctattctgaaatcctcagctcccaaaataacgcatggtacacagtaggagctcaatagacgaaaaaatccagttttgaataaaattatcataatcattacagaaggtgaagaggcagcaggcatacttcacttggccagagcaagaggaagagagtagggggagggaggtgccacacactttccaacaactagatcttgagataactctatcttgagaaccgcaccagaaggagaaattcgcctccatggttcatttacctcctagcaggccccaccttaaacattggggattacaatttggcaagagattttggcagggacacatatccaaaccatattaccatcaaatataaaaggtagaatacatttacttttagatatccaaggtctttaaaaatgtacctaacatgcacactctctggataccaggatgcaaactgtctgtggaatcagcaagcaaaacaagagcagaaccaaacagaaggagactcagagacagggaagccatttgagggagtaaggaggggaggcttaggtcacagctttacactcttcagagagaaaccaaatcagaggaggaagaaggcaggctgcaggagagacatctgcagggaaagaaaaaatgtaacccagagataatttaaagtgctataaacaaatgaaaaacaattttggggcaagtgtaagctaagtggtagtattttagcaaaacttagcaataggcaaaaagaaaatcaaactaatataaagtgaaataactatttaattcaagaaataaatttgtattaaaaaggtaataaaagggcgggtgtgctggctcatgcctataaccccagcactttgggaggctgaggtaggcagatcatttgaggtcaggagtttgagaccagcctgaccaacatcgtgaaaccccatctctactaaaaatacaaaagaattagccaggcgtggtggcccacacccgtaatcccagctacttgggaagccgaggtaggagaattgcttgaacttggcaagcagaggttgcagtgagcccagatcatgcctctgtactctagcctgggtgacaaagtgaaactccgtctcaaaaagaagaaaaagaaaaaaaaaggtaataaaatcatagtatactgcttgggtgtttagtaaataatatttgattaatcaccttacagcattcgctgactacaagtttaggtaaaaataatgttattagtattctgaattgctagaatggtggggaagggcagttaacagaaaagtggtttccaagtatctctcagtattaaagggcagtttttagagtttatatggtttaaggtcaaatagatgaggaaaaaattaactgaaagaaggagaaaaactaaactttacaaaaaaaactcttcatatttattatcttcattaaaataataattttctcaaggataaatctcaagaattagcaaattcagggtcccaaaagtaacagatgctgtggaactggatgctctaaaaccaagtataacaaaatctcaggaaaataagcttctcaacgaaaaacttgattcacatgcaagccaactagaaaaaaagaaaatacagctttttaccatcaactgaaaggactaataaggaggggaacaaagaaaaactactttatatgtctgctagtttatgtacctaaaaagtagagattagggattaatttcatcatattgtttacaaaaatttgtaattcggctgggtgcggtggctcacgtctgcaatcccagtactttgggagaaaaaaatattaaaacttttgttactgcaaacctatgaattttgtacaaatctaaacagtgctaattttaaaagacctgggcttggagtggtggctcatgcctgtaatcccaacactttgggaggccaaggtgggcagatcacctgaggtcaggagttcgagaccagcctggccaacatcatgaaaccccatatctactaaaaatacaaaaattagctggtcatgggggcatatgcctgcaatctcagctacccaggaggctgaggcaggagtattgcttgaacccgggaggcagaggctgtagtgagttgagattgcaccactgcatgccagcctgtgcagcagagcaagactccatctcaaaaaatatatatatataattcatttatcttgattatatctgcttagcataataccaatatttactatataatatatttaggcctatttccacaaatattatttggggtatctcttattataaagtctatgaacacagtagaagacaatgaaaatgtttattcactgagtgttacagtatttcaggtatctttacctagagtattaaacctaatatttctaaaccaaaatccaatctataaaaaatcaacttaaaattttttttagattttgatgaaaatataatcctggaatatattgctaggaacattatgcagatgtagcaaatatttgttgagctgaattaaagtctccaagcctataattttaaatttttcttgatgcaatttcaaaaatttcctaaggctataagaacttagtcatacatacagaaaatattgatttcaataggtaaggtgtggcctcaggcaggcaaagctcaaattatttttgaaaagttttctaattctttttaacatttttatattattttaaatgttctactttttgtaatttgttttttgattccttctttgctacataaatgaaaagtaacacacaaaccatttctgaaatcttcaaaaaagctttggatagaaaatctggagattattctggcttttttagtgtagacatctttgaaagttttcaaattgaagaaatatacaaatagaaatattctattaaataggatacatgatactgtctatagaataattaccttggctttagtttttgtagctaataatttttaagattacttcccctacattttattacttcggctagaaatcttgtttatttaagttattgttagcttagtcaaacttcaaactgtaatattggaattaacagagcattgtcagaattctgcaaaaagtcatctgtatattctcaagtttttatatcatagaaaggcctttgccaggtgtggtggctcatgcctgtaattccagcactttgggaggctgagacgggcagatcatgaggtcaggagatcgagaccatcctggccaacatggtgaaaccccgtttctactaaaaatacaaaaattagctgggcgtggtggcaggtgcttataatcccagctactcaggaggctgaggcaggagaatagcttgaaccatggagtcggaggttgcagtgagcagagattgcgccattgcactccagcctggcgacagagcgagactctgtctcaaaaaaaaaagggggttcaaatccagtacttagagctttctaggtgtttctagccaaattcagattaaattggctaataatgtctttcaaattgttgtaccatgctccaatattgaagtataacttctagaaacaaatgaaaaacaagttgttttcaaattatatgttcttagttacactgtaacacagtatgaagccttgaaaatatctgaagagagaaaatggaatcagcaatgatccagctgtgacctcactacttagtaattgtgcttttagccaacttatttacttatctctgaactgagcacatttctggcaaggtggtactaatcactgatcaaaactaccttaaaaaaaattcagaaatctcagggtatccagagaaaatagagcaggtgctctgaatagtcaccattaacatttcactttgtttcagtatctatttactatcacttaagtacatacaaagaatacaagaaaattgcccatttctcatttttaatgctaaccctaaaacaataaggcttttgcagcttgaaattaacagattctggccaggcagggtggctaacatctgtaatcctagcattttgggagggagtggaaggtggatcacaaggtcaggagttcgaggccagcctggctaatatggtgaaaccccgtctctactaaaaacacaaaaattagctgggcatggtgacatgcacctgttcccagctgctcgggaggctgaggcaggagaattgcttgaacctgggaaatggaggttgcagtgagcagagatcatgcaactgcactccagcctgggcaacagagcgagactgtctcaaaaaaaaaaaaaaaagaaaagaaaagaaaagaaaaggagagaaaaaagaaattaacagcttctcactggtccttcaacagaaggttaaatgatgatggagtcagctgcaatggaaaacactccaaattttccatggtaaacaaatctggcctcagttcttgcagttcccaaattcacagttcttttgggatatgttgatgcatgagctgcaaaagataaaacattccacaccagaagattttgtttataaaaacttattcccatctaataattttaggagatataaacacagcaatgttaatgactacctattaattgttaattcttggagaaaaattgacagttatttctgaaaacatgaaaagcttcatataataattagaaccttacatgtgaaattctatttattatggagaagttaataactaatatgttaccagcaataaaatataaatcatttctcactgtgttaccaatggccagtccgcacaggtttgcagtgattttggtttttgtcttctcaaaagaaagtatctagccaagagacaaaaagcaaatttgaagcaaaagttggactttattgaaagaaagcaaagtagctttggaaagggaccaaatgggtgacttagagatcaagtgccctacctggcccttggctccagtttcttacacattcacttattttctagtattatggactcctcccctggtccctttggcatgattaatgcctcactgttgcttgtgcggtacttgccagcagtagggaagtcgtctgcatgcttcatgagtgttctgaggttctatgcttgctctattggagatattatttttaccagttgagcacctccagagaaaggcatatattggttaaactccactattttgcctctcactgtccatgcttggatggtcttgccaaatttttgagattttattaagttgttgcccaagcactcaaaatgttttctatttgttagaagggtgcccctacttgtcaccagctgagaccacttatcaatcctgaggtgaccacctgataatcacttgacattcctggggcacattcccagggcctctaccttacccaactcatcactatctgactacctgctctaactgggtaattggatattctattgcctgtgaaacttttggtatctaaaacttttaccagtcaatatatacagcccatcaactttcttcactttaattgtaatatgagtttcattttcttttgctgatacagtagttaagattttattttatacttactcatttattaattttgaaagcattataattaaaataaaatttatatggctgccatctaatatgtttgtagatgttagccaaaagtctggcacgggaaaagaaggagaaaaaaaagtagcaggagggagtttttatctttctaaatgattatatgtgcctcctaaaaggtgtttacctataaattataggtggtggcagcagtagcagacaaaggtgtggtatgcagcccttgatcatttcaatgctgctcctgttgagcccatggcaacccagccctgtgtgtagccctcatcctgcactatgtcatcacatcccccctgctggcatgggcacatgagcctcaggcagaccgcaggtgcggggcctgagctggcctctcctgctgttgctactgctgctgcttgagctgctggcctcaggagtgcaggaaacatggggtcactggggaactgagaacagccacactggcatagtcgacaccttttgctggagcatccatagcctgttgtgaaaaggcaatatctgctgctcaaaagatcttgacctggctcaccaagaagtttgtgttgggagtacatatgtttctacagacattgtggagagtctagtaagaggttttggatgttcttggacttgacatctccaacctgtcccagcattgcaacccagcctcagtggccagcagcctagcctaggcccttcttttggtcagtgccagctgcttggcctactgattctagtttctgaccctggacataaccttcaaagcactgcatctggtgttcagcacttcttctggatcgtgtggaccatcctgttctccaggtcctgcaagcacattctgcacaaggataagggtgaggaatgaggtgctccctgtgcttcacagtaaagtccaccttatgacctggcccatgggcttttacaggcatggcagctctactgtaaataagaagctggagcacctgagaacaaggtcagacttttcaacatttgcctcaacagggggctaaaaattctccactgctccaaagaagcgtaaaggttagccaaccataagtgccagtttcttttttcttttttttttttttgagacggagtctcactctgtcacccaggctggagtgcaatggcgcgatcttggccactgctacctccaccttctgggctcaagggattctcctgcctcagcctcctgagtaactgggatgacaggcatatgtcaccacgcccagctaatttttgtatttttagtagaggcagggtttcacgatgctggtcaggttggtctcaaactcctgacttcaagtgaactgcctgccttggcctcccaaagtgccgttacaggcatgagccaccacacctggcccatcagtgccaatttctaccagtgcactgtctcaaaaaaacaaaatggagggaaaagaacaaacaccagaccccaaacaaaaaaaaaatggctgagcaagtaggggcaaatagtaaagatttttttttttttttttgagactgagtctcactctgtcaccaggctggagtgcagtggggcaatctcggctcactgcaacctcagcctccagggttcaagcgattctcctccctgaacctcctgagcagctgggactacaggtgcgcaccaccacacccagctaatttttgtatttttagtagagacggcatttcaccatgttggccaggatgatctccatctcttgacctcgtggtccgccagcctcaccttcccaaagtgctgggattacaggcgtgagccaccgcacccagccgcaaagatatttttatccttttattagttcttgggacagctctttttattcccagaagaataaaaacagcatttgtgtagatctacacatgaagtgtcattagtagaaaagcgtttttaaacaatgtatataaccacatttgtctgtaaagtaagagaaatttgtgagtagagaataaagttaacttttcctagcatttaaatatatttttgaaagggtaattcataaaggcagattaaagcttcttaaaactttacactgaggaaagaatatgctaatttgacattttagaaaagtttaaatgcaggccgggcgcggtggctcatgcctgtaatctcagcactttgggaggctgaggtgggcggatcacgaggtcaagaaatcgagaccatcctggccaacatggtgaaaccccgtctctactaaaaatacaaaaaattagctgggtgtggtggcatgcacctgtagtcccagctgcccaggaggctgaggcaggagaattgcttgaacccgggaggcagaggttgcagtgagccgagatagtgccattgcactccaacctggtaacagagtgagactccatctcaaaaaaaaaaaaaaaaaaaaagtgtaaatgcaagtgtttgtttttgcagcttagggtttgttgggtaagatctgtgcaaattatattgacttagttcgtgaatgttgtcatttctaaatgtggacagttgggctggaggattaaactcaacctcttttgaattctggtggccctctgccaacactccatcattcagatttctaaatgaaacaattatttttagaagacctaagatttttttccctctgtactttgatgtattttaacctcaatattttgaataggaaaaggaatggaagagatgccaaggggtttgatgccaagagctatctgggtaaccgctgaagatcattcaagactcaatttaaagtccaaatgttactgctagccagctaggcctatatacaaaagctatatcctggaaggctttttgttggtttcattttggttttggttaatgcgggacatgagaaggaaaacaaacagtagtggctaatgacattctcaaatctattgctgcttagaaagcattctcacgaacagtaagcagcaacagacaagccttggagaaaatctgaatggttttctttgaaatacttatagtagggttgttaggtgctttttctgaggcctattctgctctcattttaggtggcctctatcagcagagactgagacatacatagtggacagctgtgaggaccctgggcaagggagattcagaaggcatgggtcagggactggtggaaacactagtctgctagaactcattaggaagtgaagcccagcatttgcataatgcagctgtgaaggcgtctggtgatcataaatgtctccatggcccttctcagcccaccaatgtgctccagcagccactcacacagccctgcatgcaggtttgtaggtagtcctgtcagatctgctagaatcaagaccttatagtccaggtctcagtttgaagaaaacagctgtctacccactcttgtgaaaagattctgtgaaatttaactttgcattgcaagtgtttgggaaacaggtgtagatttctttgaggatgcttacaaaactacagttgttttttttgagatgaagcctcactgtcgcccaggctggagtgcaatggcgtgatctcggctcactgcaacctctccctctggggttcaagtgattctcctgcctcagcctcctgagtagctgggattacaggtgcatgccaccacggccagctaatttttgtatttttactaaagataagaaaaatgttctctccacagtaagaatcaatattatttcatcactgatattttccgtctctgacttgaagctaccaactaactccagcagaaatgtttttggcttattatggacaatctgttacacagcaagcaccatcatgcttgttcactatatttatgtatagaaacatcctcataaggccaggcgcagtggctcatgcctgtaatcctagcactttgagaggctgaggtgagcacatcacaaggtcaggagatggagaccatcctggctaacatggtgaaaccttgtctctactaaaaatacaaaacagaaaattagctgggcatggtagtgtgtgcctgtagctactcaggaggctgaggcaggagaattgcttgaacctgggaggcagaggttgcagtgagccgagatcatgccactgcactccagtctgggtgacagagcaagactctgtctcaaaacaaaacagaacaaaaaaacttcagaacttatgaagcctccctagtatttacctgaactaattagctcaataaatttacatatgtcaattatagaaagtgaaatgaacaatagctaaagtaggtttatatagaagtctccaattaaataaacaaaatcgaatatcctaactcaatataacttaaaacactaattgtggaattgcacctaaaaattattttgtgtgcacaactaaatttcataaaaatcattcttataatccccagtgagcttacataatacctcataaactataaaagaaaaaataataaaaaagaaaattatgggtctagcatgagtaccaagcaagtaaaaaaaaagtttgcatggggagattctgaaccataaaccataagatcttacagtaatgaattcaatagaaagcagacagtatagatttcctttcagcatttttgaggtttttagttttctagtaaattagtcaccttattaaaattacttgttttgcttcaatattgattttttcttcctaaaataggtagacactcatacaagaacagttacttactccataattttcttacacctaaggtttatctttagagtaatgtatgtgtatatttaaccctatgtaagtcaaaactaaaactctgtatgtgtttcaggcagagcggccacatagtcaaagaaaaatatataccaatgtttattcatgactcaggaatgtatggactttatttatacttctatataatttttataattaaaatgaccctgtagtcaataacaatttaattgtacattaaaataatgaagtgtagaattggcttgtaatacaaaggataaatgctgaaggtaatagatactttatcctgatgtgactaatacatattatatgcctgtatcaaaacatgttatatattgcataaatatatacacatttggccaggtgcagtggctcatgcctgtggtcccagaactctgggaggccgaggcaggcagatcatgaggtcagaagatcgagaccatcctggccaacatggtgaaactccatctctactaaaaatacaaaaattagcctggtgtgatggtggacgcctgtaatcccagctattcgggaggctgaggcaggagaatcacttgaaccggggaggtgggggttgcagtgagccaagatcatgccactgtactccagcctgggtgacagagcgagactccatctccaaaaaaaaacccaaacaagtagtgggcgcctgtggtcccagctacttgggaggctgaggcaggagaatggagtgaacctgggaggcggagcttgcagtgagccaagatcgcgccactgcactccagcctgggcgagagcaagactctgtctcaaaaaaaaaaaccaaacaaacaaaaaaaattatgaatagcacaaagaataaaataaggtaattaaaatcatactatgtacccacagaaattaagaacagtaagtttaaataagacaaaaaagaatatttaacctatagaaaaatattctttaacttatttgcagttgaaagccactggtgaaatagattaatagaaatgttagtccattatgttaccaaatagtatattgttaccatcttttacatacactcttgagtaaggtgaaataggttaaagttagaagcataataatgcttcattgaatgtacaatggtcttaacacatttttttaaaagttatatttacatgtaatctaaaaatttaaaaatgtacatttaattacataaaattacaataagtaaaatgacttactaatttaaccaattttaactaaaataaaaaacttttgtcactataatgcagaagaatattactctgaaaacctatctcctgcatcactcctttataagttaaccacaaagagcctctccagttacattttcatcacgcatcttttttttttttttttttctttttgagatggagtttgacttttgttgcccaggttggagtgcaatggtatgatttcggctcactgagacctccactttccaggttcaagtgattctcctgcttcagcctttgaagtagctgggattataggtgcctggtaaatttttgtatttttagtaaagacagggtttcaccatgttggtcaggctggtctcaaactcctgacctcaggtgatccaccggcctcagcctcccaaagtgctgggattataggcatgagccaccatgcctggctgcatcttacactttaatatccttactgttccataaaaaatgttttaaataatgcccacctaataaaagaatctctcatatctttggtgcagcaacaattggtcacatgctttcacatgtgaatatagcaggaatgaaaaaagagcataaagttatttgagagtttaattacatcattattcactaatttaaaaatcagtaattttttcaagataaaagtatactttaattgtaattataactgaaaatcttctacttcttttaatgttatatacaaataatttatccaccaagttttattttgtgttgttttctgtacttagcactgatttagtgtaatgtctgaagtgtccgcgccttagatatttctactgtgaattctcagatatttacataaacttaatttcggattaaatttttttcatttttactgcatctgcaaaaacatattttagtatgaaccctgtggtgttttctatgctgtggtttttttaaaaatgtttttccaaactgattacatttgtagggtttttctccaatataaattccctgatgttgaataaactttgtactatcaaccaagcattatagaccctcatgttttataagctgtagtttttcaaaactgtttttacaaatttattacattttccaggggttttttccaatataaattttctgatgttgaacagtatttgagcaactgcttcagggttttctttagtacaaaatgtgtacaataagatctgtgatgcaagtaatggtactacaaccctcttaatatttgtaatgtttgtcttcagaatgaattatcttcttcactttaaaggcttttattttctgaaagatcttttgacactagttgcatctataatggttttattaagtacagactctctgatgttgagtaagatatgagcacatattaatggcttttccacattctttgtgtatatacctttttccaagtaaaaattctttcctgtgcaataaggtacgagcattaattaaaagttttgccacattcttcacacttgtagaagtttactccaatgtaaattatcttacctacaatcaagtgtgacaaccatgtaaagcctttatcacattctttacatttctagaatttctcaccagtataatttattttatgtttgaaaaagtttgaggtgttgtcaaaatcactgtcacatcttcaggtttgtagagtttctctccagtatgaattttgttatgtgtagtaaggtttgaatattggttgaaagctttgccacattctttacatttgtagggttgctctttagtatgaattctcttatgtgtattaaggtgtgaggaatagttaaatgctttgccacattcttcacatttgtagggttgctctccagtatgaattttcttatgttcaataaggtttgaggatcggttaaaagctttgccacatttttcacatttgtagggtttctctccagtatgaataatcttatgtgtagaaagggttgaggacagtttaaaagctttgccacattcttcacatttgtagggtttctctccagtatgaattatcttatgtttagtaagggttgaggaccacttaaaggctttgccacattcttcacatttgtagggtttctcctcagtgtgaattatcttatgtttagtaagagttgagaactggttaaaagctttgccacattcttcacatttgtagggttttcctccagtatgaatttttttatgtgtagtaaggtttgaagattgggtaaaagctttgccacattcttcacatttgtagaatttctctccagtatgaattttcttatgtgtagtaaggtttgaggattgggtaaaagctttgccacattcttcacacttgtagggtttctctccagtatgaatcctcttatgtttggtaaggattgagaaatggttaaaagctttgccacattcttcacatttgtagggtttctctccagtatgagttatcttatgttcagtaagctttgaggaccacttaaaagctttgccacattcttcacatttgtagggtttcttttcaatgtgaattttcttatgtttagtaaggtttgaggaccggctaaaagctttgccacattcttcacatttgtacggtttttctgcagtatgaattctcttatgtgtagtaaggtttgagaactggttaaaggctttgccacatacttcacatttgtagggtttctctccagtatgaattctgttatgtttagtaagggttgagggccagttaaaggctttgccacattcttcacatttgtagggtttctctccagtatgagttaacttatgttcagtaagctttgaggaccacttaaaagctttgccacattcttcacatttgtagggtttcttttcagtatgaattttcttatgtttagtaaggtttgaggaccggctaaaagcttcaccacattctgtacatttatagaatttctctgcagtatggattctcttatgtgtagtaaggtttgagaactggttaaaggctttgccacattcttcacatgtgtagggtttctctccagtatgaattctcttatgtttagtaagagttgagggccagttaaaggctttgccacattcttcacatttgtaaggtttctctccaggatgaattttcttatgttcagtaaggtttgaggattggttaaaagctttggcacattctttacatttgtagaatttctctccagtgcgaattatcttatgggtagtaaggattgaggacttgttaaaagctttgccacattcttcacatttgtagagtttgtatctagtataattttttttatgtgtagtaaggcgtgaggaccaattaaagactttgccacattcttcacatgtgtagggtttctctccagtattaattctcttatgtttagtgatgattgaagggcagttaaaagcttttccacatttttcacatttgcagaaattcactctggtatgaattattttatgttgagctagatgtggaagcatgcaaaatgatttgccacattctttgcatttgaaaagttttttttcagtatggcttatcttatgtctgtttgaatttgaaaatttatgaaaggctttcacacatttatcaaatagaaatattttgctctgggtagctggcaaacattggttaaatccattataacctcctctgtgcaccttacactcatccacacttttatggtctttttttaaatgtacatttttatgttcacagtttttatatcttctcagtgtcgctttttggaaaggatcttttatatgctgctctggccaaaagtcttgggtaaaatgagaacacataactgaaaaaaataaaaataacaaattattccacttgctagactcagagataaatatactttatgtaacatataaaatcacacaagctacataagcaagatgtcatagaaaaataccacaggccctaatttatttatagacatataaatgtaacaaaaacatactgatcaaatcagtgaaaaatttacaaataagtgtgtgcagtgccccaggtgagtccaatgcaaagagccacatagaaggaaaatataaattggttacatttacccaacacagctttttctgctctccaacataacatagtgcctttagaagtaaattgccaactccaattattttgcatatagcggaatacctgagagtggataatttataaagaaaaaaggcttattttgctcacaatttggcagactgtacaagaagtgtgtgtcagcatctgtttctggtgagggtctcaggaagcttactgttatggtagaaggcaaagagtaactggaaatgtcacatggtaatagggaaagtgtgaggtgaaggagccaggttcttttaatgaaccagctctcttttgaattaacagagtgtaaactttcttattaccaagactatggtgccaagtcattcatgaggaattcacctccatgacaaaaatacctttttccagatcccacatccaacactgaagattatactgcagcatgaggtttggaaacatggacatccaaaccatatcacagacaaaggagacttaacagactcatacaaacctttccagtaaaaagcaagacaatatacaatattcttctttgcatcttgtgtattctgctaggataaataccaagtcttattaaatttaagaataccagctgggtgcagtcgcttatgcttataatcctaaaattttggaaacaaaagtaggaggatcacttggggccacaagtttgagaccagccagggcaacatagtgagactctgtctctacaaataataataaaaaattagccagggatggtagtgcatgtctgtacacccagctacttaaggggctaaggttgacttgagcccaggaggttgaggctgcagtgagccaaaatcatgtcactgcactccagcctgggcaagagtaagatcctgtctcaaaacaacaacaacaacgacgacgacaaataaatttaagaagaccaaaattatacactgtgtttttcgaccaaaattgcataaaactaggaattaaaagcaaaactggcaaatccaaaaatatatcaaaataaaacacactcttcaacatattcttgctcaaggaccgaagaatttaacttttccaaagttgtcaatacaagctacagtggtgaactaattcaatataatctctacataaaattcaatggtacaatttttcacagaaatattcttcacaattttaaaatttgattaaaaactatagccaagccaggcatggtggctcacacttgtaatcctagcactttgggaggccaaggcaggtggatttcctgctgagctcaggagttcgagaccagcctgggcaacatggtgaaaccctgtctctactaaaatacaaaaaattagctgggcatggctatatgtgcctgtaatcccagctacttgggaggctgaggcaggagaattgctagaacccaagaggcagagctttcagtgagccaagatcatgccactgcactccagcctgggcaacagagcgagactctgtctctaaaaaaaaaaacaaaaaaaaaaaactatagccaagcaactatgaaaacaataaagaggcattatactttctgatttcaaaacatattaaaagctacaataacaatgtggtactgacacaaagacagataagtagatgaaagaacagaataaagagtcctaaaatgaacccttctgtgtatgatcaaatgaacttctacaaagttgccatgaggaagcaatagaaaaaaatctcttcaaaaaatgatgctgaaacgtggataccaacactaataaaataaagttggataattttcttgaattatatatacaaatattttaaataaaacacatagaaaaaaggaactaacaaatcttttaaaaagaaatatggaaaaaagacatgacattggtcttggcaccattttcttagacacaaccttaaatgcatgaacagcaaagaaaagaacagaaaaatttaactacactatacctcgaaattactgtacatcaaagaaaacattcaatagagagacaatgcctcctagaaaatgagtgaaagtatttgtaaatcacatgtgatattccttaatattcataatatacaaacaactttttttttctttttttttgagacggagtctcactctgtcacccatgctggagtgcagcggggcgttctcagctcactgcacactccatctcccgggttcacaccattctcctgtctcggcctcccgagtagctgggattacaggcgcgcaccaccacgcccggctaattttttatatttttagtagagacagggtttaaccatggtctcgatctcctgacctcgtgatccgcccgcctcagcctcccaaagtgctgggattataggcgtaagccactgctcctggcctataaacaactcttaaaactaacaataaagttgaataatctgatttggaaatggacaaataattgaactaaatttttaccaaaaatatacacaaatgggaagaagcatttaaaaagacacaaaattacaatttgtagagaaatgcataaaaatcacaatgaaaaacaaaatcacctatcacccatttagaatggctactataaattttttaaaaatacaaaatctgttgatgatgcaataaaaataaaaccatccaggtaggtacagtggctcacatctttaaacccagtgctttgggaggctgagacaggtgaatcaccataggtcagaagttcgagatcagcccggccaacatggcaaaaccccatctctactaaaaacacaaaaattagccgggcatagtggtgggtgcctgtaatctcggctaccctgaggctgaggcaggagaattgtttgaacctgggacatgagaacaaatcactgcacttcagtctgggtgacagagtgtgactccatctcaaaaaaaaataataataaaaaattacaaattaaaaaaaaaaacctatgttgactgttgatggaaaacaaggaggccgaggtgggcagatcgcctgaggtcataagttcgagaccagcctgatcaacatggaataactccatctctactaaaaatacaaaattaaccaggcatggtggcacatgcctgtaatcccagctactcaggaagctgaggcagaagactcacttgaacccagtggggcagaggttgcagtgaactgagagcacgccattggactccagcctaggcgacaagagtgaaactctgtctccaaaaaaaaaaaaaaattataaatgtttctcagatacttaaaaatgaaatcatcaaatacaaaaatctcatttatgaatctatattcataacagaaaatgcaggacctgaatgacatatgaacatccatattttttgtatcagtatgcacaaaagccaaaaggctgaagaaacttagatgtcccttgatttataaatacatcaaaaaattaatatagatctacaatgtaatattattcagccttcaaatagaaaatcttgcctcattttaagataaattttgagaatattatgtcacctgaaattagcaagtaatgaaattatggataccatatgactcaacttatttgagatatcttaagtagtcacactcataaaatcagcaagtaaaacgctgtttgtcaagcgctgaaaagagggcaaaatgagcacttgttacttaatgtgtatttagtttcacaggtgtaaaatttctagaagttttttgaataacaatgtaaatatttttatcatgagtgaaaagtacttttttttttttaagacaggttctcactttgtcacccaagcttaagtacagtggcacaattatggctcactgtagactctaacttcaaagctcatgtaatccctccccctcaatctcccaaaaagcttgtaccatgggtgcataccaccatgcctggctattttcaaaaattatttgtagagagggaatctccatatattgcccagactagtctcaaactttggcctgaagcaatccacctgtcttggcctcccaaaatcctgggattacagatgtgagtcaccatcatgcctgaaatgtacacttcaatagatttaagatggtaaatttcatgttacatgtttttacaacactaacattaaaaaaaaacaaaaaaatacagcattataaactttttaaaaaattaccctcaaattacaaaagtgtttctctcatacaaagaaaatatacattcatcattaaacacatggtgaaaatagactatttccatgactactaacttagagaagacaaaacaaccattaaaaattagctaaaaaataatatatacaagataagctttaaccaaaattggggtcatatatttataaacacacacacacatatataatatgattgtgatagacatttggtgattgatctctttttttttttttttctgagatggagtcttgctctgtcgcccaggctggagtgcaacggcacgatctggctcactgcaatctccacttcccgggtttgagcgattctcctgcttcagcctcctgagtagctgggactacaggtgcgtaccactatgcccggctaattttttgtatttttagtagagacggggtttcaccgtgttagccaggatggtctcatctcctgaccttgtgatccatctgcctcagcctctcaaagtgctgggattgcaggcgtgagccaccgtgcccggccaattaaagcccaatatgggatttaattatctcttaattaaagcatacagaattgaaaattgtctgaaattataatacataggtaaaaccaaaaaacacaataaactgatgttaagaaacctacactgaagaaatacactaatatgaaactggaaaacaataataagagaaatgtttactcataaaatctggtatgcaaggccaggcacagtggctcatgcctgtaatcccagcactttgggaggccgaggcaggcggatcacctgaggtcagaaattcaagaccagcctgaccaatatgatgaaaccctgtctctactaaaaatacaaaaattagctgggcatgatggcaaatgcctataatcccagctactcaggaggctgagacaggagaatcgctggaacctggaggggcggaggttgcagtgagccgagatcatgccattgcactccagcctgggcaacgagagcaaaactccatttcaaaaaaaaaaaaaatctggtatgcaacattgatgcaccattaaagaagaatttgtttagataactacaatatttgtaactttgtacttctgcatcattggcatgaactgtacagcagtaaaattttagagaaaatgcagtataatcataaatacaagattgtaatgagaaacttttaataaacatttaaaagaaactatagataatttttatattttaagtagatgctatacttacaaaaaatgaaactgctgtaatccaactttagaggcaaagaatagccttacaactaaattacatatatatatatatatatatattttgcagaatacggttacagcctctgatatataaaacaaatatttgggaataaattatattatttataattagggtacaaaagtaggtacaaatcctatcattctcttttacctacagcaaacttaaatttataactatattagtaaatatggagtgcttactgattatctaatttacttcagacataatatgtaaattctagtataattgtcctaaatgtctgaatccaaaattacagacaaatttggaaataaaaaatagaaactgggtcaggcatggtggctcatgcctgtaatcccagcactttgagaggctgagatgggtggatcatttgaggtcagaagttatagaccaacctgactaacatggtgaaatcccatctctacttaaaatacaaaaaaattagccaggtgtgatgggggacacctgtaacctcaggtacttgggaggctgaggcagcagaatcagttgaaactgggaagtggaggttgcaatgagctgagactgtgccattgcactccagcctgggcaacagagcgagactctgacgcaaaaaaaaaaaagaaaagaaaagaaaaactaaaaactaaaaatgtatagggagagtgacaacagtaagatggaaaaataaaaggtgccctacttgcttatccccacagagcaagaacgtttctcagccatcctagacaaaaatgcctttatgagagccaggaggcatcatggctcacacttgcaatgacagctacacggtacattgaggtaggagaattgcttcaggtcaggaatttaagatcaggctgggttatgtagcaagaccccatctgaaaaataagttcctttaaaagagctttgagatccaggcaggcagttgtaaaactcacataaagcccaagattaaggagttttctttttcagaaggcaggctctcattcaggtggcaaactacgggacccctgttcttaactacagaccagaaaatggcccacccaacttggtcccacagaaaattctgaacttactctgtaagcatcccaaactgcttccagccacagtttgggagaggtcctgttcttcaaaaggcctggaggaagatactggtttatagtgatgcaggcctttactgtggaccctgaagcagttcaatgactgttccagctccctgagccatggtttatggccagttctgcctaactagaaacccacacagttacctggggaaatcctctctggtactcagtgaaaaccgcactcatccacaacctgatataaagcccaccatatgcagacccgactgcaaaaaactgccctagtgttctgccctacagaggaaagtccaaaaataaaatggaaattacaactacccaagccccttgtaacaagccaactaaaggcggaccctagtgcagactcagcagccttgtgaccaagcaacgacccctcttcactacaggccaggggtggtggctcatgcctgtaatcccagcaatttggaaggccgaggcagacagatcacctgaggtcaggagtctgagaccaacctggccaaacatggcgaaaccctgtctctactaaaaatacaaaaattagccaggcatggtggcatgggcctgtaatcccatctactcgggaggctgagagagaaggcagaggttgcagtgagccgagattgtgccactgtactccagcctgggtgacagagcaagcctctgtctttaaaaaaaaaaaaaaagccacggtatccaaagtgatctataaatttaataaactttctatcaaaattccagtgggatttttttcacagtaatggacaatgcaattctaaaatatacatgaaactagaataaactttgaacaaagcaatcttgaggaaaaagaacaaagcaaagaaacatcataattcataatttcatattatttaaaggctacagtaataaaaacaggatgaactgtgcagaaaatatacaaagaaatccaatggaacagaaagcactactcacacatttcagacatgatgtaaagaaagaacttaaaaaatagtttaatatacagtttctcaaaagtatgcagatatttgtgtgtcccccaaaagaatggaaaagcagtcagattgttcagtctcttaaatgtcatgaagaggactttggctgtcatggtaaacttgaaggaagatcaccgaagggaaataagaatcctgagagaatgtaaaagcataagacagaagatacccttgtgtgaaagcaaaatgaaaaaactcaggctttccagaaactctttcctttggaacacagcttcccaagtcacattttaaggactggctttccccttaacctttggacttctcatctgtgtttgttgtattcactttcactctcacctacctgggggtttggctaccatttcatgtctcctcataggctcccaaggctctttttcttgctccagacaggtgatcaggtctggcttagagacagcaatacctgtttcaataaaaaataaattacgtgaatcttgctcatattctcccattattaacctagtaatgtgtccagtatgaagggtgtgatagaatatcctaatcattaatcccaaaatactaatttttttttttttggagatggagtctcaatctgtcaccaaggctggagtacagtggtgcgatcttggccccctgcaatctccacctccgggattcaagcaattccaatgcctcagtctcccaagtagttgggattacaagcgtgtgccaccatgcctgattaatttttgtatttttagtagagacagggttttgccatgttggtcaggctggtctcaaactcctgaccgggtgatccgcctgccttggcatcccaaagtgctgggattacaggcatgagccaccgtacctggccccaaaatactaatttttaacaaaaatttcttcttgtttgagacagagtctcactctgttgcccagtctggagtgcagtggcacgatctcggctcactgcaacctccacctcctgggttcaagccattctcctgcctcaggctcctgagtagctgggattactggcatgaaacaccacacctggctaatttttgcatttttagtagagatgcggttttgccatgttggtcaggctggtctcaaactcctgacctcaggtatctgcctgcctcggcctcccagagtaccgggattacaggagtaagccaccatgcctggcctttaacaaaaatttgtaaatatttagaaagtatcttattttgtaggttcttaatttcactacctggtaatactgaatcaaaaattaatgttggcaattagattttaagttgtgggcaacagtattttatgccacttaatttctggaattactactaatctggagtgaaagatcagctcagaaatgtggaaagttcaggtcaagatgaaacatcttgaaaaaaattctttagtgcgccaacaaatcccaatttttttgaaaacaggaatctgaaactcatgaatgcaaagtataaattaccaaaaaaacagtctacagaaaacaaaaatgaaatctttagggtatattaggaattgagtattgaagttatgctcacccaggaagaccaggtttctgtagttctctaacatcacattcctatataaattctgctgtgcaatgtccaggcattgccactcctccagacagaattctatggccacatccataaatgtcaatggtccctaaaaaaaacaacacatacacacacaaacacacacatttaccaagtggccacaggcagaatttataatttgactcaaggtaaaatgagagagtaaagagaacaggtactgacttatagaagagactgaaattatccaataaaataattcttttcatggaattattctccaatgtattttctacccctgagaaaagaaagtgatgtaagatccacaacatcagtgtatatataatacttttctggatgataaactgtaaaattaagggcatgaacacaaaagtaaatttttgagttctctatttgcatcatacagaatcagttgcgaatatttttcagataaagacatgttgagttagaagggacctttaaaatattaaggtgtacaataaactgaggatcctgttaatgaagattattttttcagaagatctggaataaagtctgagtttctaagtttctaacaagcttaccagtaatgccaatgattttggcccagaaagactattttgtcaaacatccagtaaatggaaaagtctgtgttttttttctagtttttctggcaagtaaacaaagataagagctttcattttcaaaagacagataaatgcaaagaaaacctaagaaagaagagcagctgccagattaaatgtgatggtttacgtacatcagttgcataaagattcttaataatatggccgggcatggtggctcacacctgtaatcctagcactttgggaggctgaggcaggtggatcacctgaggtcaggagtttgagaccagcctggccaacgtggagaaaacccatctctactaaaaatacaaaaattagccaagcgtggtagcacatgcctgtagtcccagttactcaaggggctgaggcaagagaatcgcttgaacccgagaggtggaggttgcagtgagctgagatcacatcattgcattccagcctgggtcaaagagcaagactccatctcaaaataataataataataatatatatatataatatatacatatatattaatatattttatatatatacacacacatatacatttaaaaaaaagacaaatggctgggcatggtggatcacacctataatcccagcactttgggaggtcaaggtgggtggatcacgagattaggagttcgagacaagcctggccaagatggtgaaaccccgtctgtactaaaaatacaaaaattagctgggtgcggtggcgggtgcctgtaatcccagctactcaggtggttgaggcaggagatttgcttgaacccaggaggcagaggttgcagtgagccaagatggcaccactgcactatagcctgggtgacagagaaagactctgtctcaaaaaaaaaaagaaagaaaaaaggaaaataattatttagggaaagagtctgtcagagagcccttgataatcaagtgaataattaacataaaatgtactagaacaaattttaagatgtgctgatgcacgcaaaaagacacagcatcactgctgtgatattgcccccaaaaagtaaattataatctaaatttaaccataaagaaatatcagttttatgcaaagttcaagatacagatgtctcccatgttctgtaattttttttttttttttttttttgaggtgaagtttctcttgttgcccaggctgaagtgcaatggtgcgatctcggctcactgtaacctctgcctcccaggttcaagcaattctcctgcctcagcctcctgagtagctaggattacaggcatgtgccaccacacctgactaattttcttgtgtttttagtagagatgggtttcattatgttggtcaggctggtctcaaactcctgaactccagtgatccacccacctcggcctctcaaagtggtgggattacaggcatgagccaccacacccggctgtaattttttttttttttttttttttttaagatggagtctcgctcagtcgcccaggctagagtgcggtggcgcgaatctccgctcactgcaagctcctcctcctgggttcatgtcattctcccgcctcagcctccagagtagctgggactacaggagcccagcactacgccctgctattttttttgtattttttttcgtagagacggggtttcaccgtgttaccgcgcctggccaaccaggctgtaatttttaatagtaatttttagtagtctatctttagcacccataaagcaagtatatcctgatagtatttttcagaactttctgctttataaatgtcttcttgtttaaacaagcattttctgaatcctattctgcatagagctaataaaaaacagactgaaactcaacattacatgttctccatttttagtaaggaccccagttttccccaatagaaatcttgagtatccacaccttcccatgttcaacaaccatgaaaggatcatttttaatattgcagttcataaagtcatggtgagaattctgcatggcatattagaagccatgatgtagagaatgtagagaaggctctgttatatagaaaagaaatattttgcagagacccttgcctatcataaaaatttaaaaagcagttaaaacaaactcattagggaggaaaaacacaagtagcaaagtacaggtttacaagtactaaacacatggcattccaggaagcagagtggacacagctcttgatctgagacatgtttagctgaaaaaaagccatttttttctctgtctctgggaatcctttccagatgagattctctggacaaattacacctgcatcttgagaatatgcctttaaagctgtcagcaccacctatttgcctactaccaccacacccacaggcagaaggaccaagacctgcagaaaaagttcacctatttttgtcctttataaccgaagagattcagcaagaatgaactgctccacggagatgctaatatgagtttcaccttttctatcctcaggtgccctcctctgccatggacaccagcaatttttgctacagtaatggaaatatgggccacactgtcctgtccctaccaaacccaaacagaacaggccctgtaaccaccctttagtgcaaagtaaaacttaactcttgtgtatgtatcttgaaccttttatacttgattctagcctcattttggagtcacatgaggcacttaattaaaacaacatggatgcttccacgcagaatctgaaccaaattataaacagaacaataagcaggcctgacctaaataaggcctccaaaaggggtgaatctgaacagaaaaaaagcagagagatgaacctatgtagaattctgttccgtggccgggcgcggtggctcacgcctgtaatcccagcactttgggaggccgaggcgggtggatcacaaggtcaggagatcgagaccatcctggctaacacagtgaaaccctgtctctactaaaaatacaaaaaattagccgggcacggtggcgggcacctgtagtcccagctactggggaggctgaggggggagaatgacgtgaacccaggaggcggagcttacagtgagccgagatcgcgccactgcactccagcctgggtgacagagcaagactccgtctcagaaaaaaaaaaaataaagaattgtgttccctatgccactgggttatttcctgttcggtttttcctaagcttacctaagacaaaattaaattccagagtttgtgtaattttaatcttttttagccgctgccctgtcaatttcataacatataccaataagcaatttaaacaaatcccttaaggttttctaggagaatttattattgtaagataaatatgtattcttagcaaggtaagatgaatagaaacagtactattttttcaataaacattccttcaagtgatgatatcagaagtcagaacaatacaaagaaagtggacaaataaagccaaagttttttttgcacacatctactcattgtaccaacaatataatgctaaattcaaccatgtatccagttgctagcctagactaaaaattcctggatgatagggatgactgcttcatctatttttttaatggccataagaaatggtagaaattagtttatctgtttgagtctccagatctcctgtttttcacccaactacaagaaaactgcaaaaactctcatctgggtaccatcttacacaagatgagaaacaagaacagcatgactaatttatcctagactgagacagagcagaattaaccattcttgtcagcatgacacaattctgttctggacattttcaaatgtcgcaaagatgtctagttgattgtgagaggattccagtgacccagagctgactgcccaatgataagccgggcaagaaagaatcaggcctttttttttttttttttttttttcgtgagatggagtttcgctcttgttgcccaggctggagtgcaatggcacaatctcagctcactgcaacctccaagcgattctcctgcctcagcctcccaagtagctgggattacaggcatgtgcaaccacacctggctaattttttttgtatttagtagagatggggttacaccatgttggtcaggctgatctcaaacttctaacctcaggtgatccatccatctcggcctcccaaagtgctgagattacaggtgtgagccaccacatccagcctcaggctgattctaaatagaaaatagaactgcctggccaggcgcagtggctcacgaatgtaatcccagcatttggggaggctgaggtgggtggatcacgaggtcagatcaagaccatcctggctaacacggtgaaaccctgtctctactaaaaacacaaaacaaaaaaaaattagccgggcgtggtgatgggtgcctgtagtcccagctactctggaggctgagggagaatgacatgaacccgggaggcggagcttgcagtgcaccaagatcgtgccactgcgctccagcccagggcgacagtgagactctgtctcaaaaaaagaaaatagaactgccctggtagagctccagaacctgcatcacctgtcctgattagctagctcttaggtaagaaaaaaagacaaaaataccctactccagtatcgtattttatgggtaggtatagctgtggtcatagctctggacattttgtggtcttgatctctcactcctaagatgcttgtttacacttacagattctgccattagattctatttacacctggagcctctcacgtaagtgttagcaggtcactgagcaaaatctgaaaagttcaaaaagccacactctcaaaggggtctttaaggtgtctatgttgatttctcacaatgcagaaaatgtctcttgctaattttctgtacattctcaatccaaaacctggccctgtcttgtgaatcccaggcagaggccaaactatatgtacagattctatgttggatcaacctggctctgcattcttgggtgttaaagcaagcagggtacaatcaaaagagatcccctcatagaggctgctgtagcacatttaaaataatatgtttacctaaaaaaaaaaaaaaaaaaagaaaaaagaaagaaaaaagaaatctgaggcaacatgaatataagtaaatcatttatttgggccaagcttgaggattataacctgggagcaatgattcaagttgtctggaatgtaaactttagcagcagttacaagtagatttgtaaaggcaaaaaagaggggcagagagtggactggtacaaagttgtttgtcagccacttaggctgggcacggtggctcatgcctgtaatcctagaactctgggaggccaaggcagctggatcacctgaggacaggagtttgagaccagcctggccaacacagtaaaaccctgtttctactaatacaaaaaattagccgggcatgttggcatatgcttgtaatcccagctactcgggaggctaaggcaggagaactgcttgaacttgggaagtgggggttgcagtgagcctagattgcaccattgtactccagcctgggcaacaagagtgaaactgtctcaaaaatcaaacaacccaaccaaccaaaaaaaaaagttgtcaggaagtcttatttatttacagaaataacactgattattgattggatatacattgttaaggtttaaggtatgggttatagtgtccagtgtgacattattagtttagtttatagctacttgtggcaatagcaaatagtttcaagagataaatacatagttcaaagggaggagaaagaaataattgtgttctcattttaatgtctctgagtttgaaaaaaggacttgcatttctcagattaaagtttttttttatttctcaaatctcaaaacccagaatcagaatttggggctgcagatttagtggagctaaatctggtggtgtggcagcaggtttcacctacacagtttagggcatttttagcaagaggaagaaagtggagatcctcatgtcctcatgtctactcaatgcacacgttactttgatcgggtttctgggccccatggtctgtgaatcactttcaggtctgaggatacaagagtcattgaaaaaggtaaaatagcctgggtcagtggctcacgcctgtaatcccagcactgtgggaggccaaggcaggtggatcaggaggtcaagagatcaagaccaatccagccaatatggtgaaacttcgtctactaaaaatacaaaaattagctgggcatggtggaactcacctgtagtcccagctacttgggaggctgaggcagaagaatcgcttaaacccgagaggcagaggttgcagtaggccgagatggtgccactgcactccagcctgggcaacagagcaagactccatctcaaaaaaataaaaaataataaatgaagaggtaaatggttggttccttctctgtgaagtttgtagaaattttgtctatcctttctagaagcgactacagttaattacatataccaaataggcaaaaaaacaattccacctgcatatttaggggacatcatacactttgcagcacaattgtgaatagatgggaagcctgaaagaaaaagtttcctctagattaaaggttagttggcaccttatgtgtttatattatgtctggtaattcaagacagtgtttggaaatggaatttaaaaaaaatttctgcagccccagagaaactccaaaatgatagaacagaaataaaattgtttattacacaattaaaccagaatgtgagcagcatgacagtaaatctgcttaagagattgcaaagacagaaagagagttcagcaggctcactaagcctgagcagtgattcaggctcagtttctacttacaatggtgacatggaaaaaatactgctgggtttggctgagtgcagtggctcacacctgtaatcccagcactttgggaaggaggcaggcagatcaccaggtcaagagatcgagaccatcctggccaacatggtgaaaccccatctatactaaaaataggtaaattagctgggtgtggtggtgcatacctgtactccaagctactaaggaggctgaggcaggggaatcacttgaaaccaggaggcggaggttgcagtgagccgagatcgcgccactgcactccagcctggcgacagagtgagactctttgtctccaaaaaaaaaaaactgttgggttttcagcatgagttcagatgatgataactccgagagttttcatcgtgcattcacaggcaccatgggacactaacagagcttctgaaacagacacccaaagcattagaaagaaaaacagctctccatttgagtaacactgtattgagaaaaaaaaaaagaagttcaaagcatcttaagaaaaaacttagattagatgaaagattgatcaagtcaaccaaaaatactccccttaaacaaatttctctctaaacgaagtgcacagctactctcagcacaagaaacatgagcattatgaaaaaaatatatattctcagcagaattttctaaggtttctcttccatgtctgctgctgtctcatctcctagccattggatgggagttccatattggaatacatctcacaatttccacatgcaccttttgatgaagaattgaaatcttgagtttattcatatagtgtaatatattcaagcttgcaacactgctaactgaagagctactatgtggtttttttttttttgaaatgaagtttccctcttgttgcccaggctggagttcaatggtgcgatcttggctcactgcaacctccgcctcccaggtttaagtgattctcctgcctcagcctcccaagtagctgggattacaggcatgcaccaccatacctggctaatttttctatttttggcagagacagggtttctccatgttggtcaagcaggtcttgaattcccaacctcaagtgatccacccaccttggcctcccaaagtgctgggattacaggtgtgagctactgcgcctggccattttttttttttttttgagatggagttgagcttttgtttcccaggctggagtgcaatggcacaatctcggctcactgcaacctccgcctcccaggttcaagcaattctcctgtctcagcctcccaagtagctaggattacaggcatgcaccacaatgtatggctaattttgtatttttagtaaagttggagtttctccatgttggtcagactggccttgaaatcccaacctcaggtgatccacccgcctcagccttccaaagtgctgggattacaggcgtaaggcaccgtacccagcctctgaagagctactatattttttgagtggccacctgacctgtttttatctgtcctgtaatagcagcattccaatttagttaaatgaaagacactaaaattaagcttccctgtaattatccatattggataaattaataagcatgtcagactaatatctattgtaacaatttggtagtgacttttctttggatattagatataaatatctaagtataaccaactttaatgtactagtcataatgtatgtagtattctaaaaaattgtttgtaaccatatttcagttaaaactactttatatttcaaagtatgagtaagaatattaaaataactatttaggctaggcatggtgattcatgcctgtaatcccagcactttgggaggccaaggcgggcataccacaaggtcaggagattgagaccatcctggctaacacggtgaaaccccatctctcataaaaatacaaaaaattaggccaggcgcggtggctcatgcctgtaatcccaatactttgggaagctgaggcgggtggatcacctgaggtcaggagttcgagaccagcctgaccaacatggagaaaccctgtctctactctaaaagtacaaaatttagccaggcatggtggcacatgcctgtaaccccagctactcaggaggctgaggcaggagaatcacttgaacccagtaggcggaggttgcagtaagctgagatcatgccattgtactccagcctgggcaacaggagtgaaactccgtctcaaaaaaagtaaatttaaggaaaaaaaaaaaatacagccggacgcggtggctcacgcctgtaatcccagcactttgggaggccgcagcgagcagatcacgaggtcaggagatcgagaccatcctggctaacacggtgaaaccccgtctctactaaaaatacaaaaaaatagccgggtgccctggcgggcgcctatactcccagctacttgggaggctgagccaggagaatggcgtgaaccagggaggcggagatcgcagtgagccaaaatggcgccactgcactccagcctgggcgaaagagagagactctgtctcaaaaaaaaaaaaaaaaaaaaaaaaaaaaaaaaattagccggacgtggtggcacgtgcctgtagtcccagctactccagctactcaggaggctaaggcaggagaatcgcttgaacccatgaggcagaggtcacagtgaaccgagatcgtgccactgcactcgagcctgggtgacagagtgagactccatcacaaaggaaaaaaaaacaaaaaacaccacacacaaaaaaaactacacagactccaaggttgagtttacacactgaactgttcttgcttttgcagtgtaagtacttcagcctgcaaatattagattaccttggattatcagttttctgtcaaagaaatttattcagtattttttagtttttaccattctgtatttctaaatttaattcgttcttcgtactaaacttctgtgtgctcttaaaatgagctttaatctaaacaaatctgtgtctactttaaaagactaaaaaaaaaattaaattttcccaaatcaaggataagcaatgaatctgaggtcttaaataaagacaatcttgagtcaaaagaatgccaaaagatttggctgttaatatgatttaaatatatttcaaaaaagcaataaaaatatctccatataatctaaatgctttaagataaaagagttgaacaagatagtctctcttattttcaggtaggataataaagcctctgatttatattttcttttacaacagccaggtctctggacatattgaactcttgaacatctgaatttcagtagacattggattcattgagctccgtctcaaaaaacaaaaaaacacaaaacctgacatcataaaagaacaagagaagaaaaagcaaactgacctctaagctaacagaggacaagaaatgaaaatcagatctgaactggagagttagacaaaaaaatgataaaaatatggagaaggctgggtgcagtggctcacccctgtaatcgcagcattttgggaggccgaggtgggcagatcacttgaggtctggagttcgagaccagcctggcaaaatagtgaaacccggtctctactaaaaatacaaaaattggccatgtgtattggtgggcacctgtaatcccagctactcaggaggctgaggcaggagaattgcttgaaccagggaggcggaggttgcagtgaggcggaggttgcagtgaggcaaggttgtgccactgcactccagcctgggcaatagagagagattctgtttcaaaaacaaaatgaaaaaaaaaaacaaaacaaaaaacaaacaaacaaacaaaaaaagaaatccaggagtaaaatctttgaaagaattaataagataaatagcactctagagagattaatgaagaaagagaagatccaaataaacacgattagaaatgacaaaatggccattaacactgacccaacaacaacaaaataattattcaagtctgtaacgaacacctctatgtaaacaaaccggaaaatctagaatagatcaattcctagacacgtacatcctccaaagactgaaaaaaaaaaaaaaagtatccctgaagagaccaacaagattcaaaattgaagtataataaatagcctagaaaccaataaaaaaccagaatcagacatattcacaaaagaattctaccagatgtacaaaaaaaaaaaagctgataccattcttactagagccattccaaaaaattgagaaggaactcttccccaactcattacataatagcattattctgataccaaaacctggtataaaacaaaaaaagaaaacttcatgccaatgatcttaataaaaaatgatggaaaaattctcaacaaaatactggcaaactgaatccagcagcacatcaaaaagctaatctactatgatcaagtagcctatatccctgggatgcaaggttatttcaacatacacaaatcaataaatgtgattaatcacataaacagaactaaagaccaaaaccacaagattatctcaatagatgcagaaaaatctttcaagaaaatttaacattcttcatgttaaaaccctcaacgaactaggcattaaaggtacatacttcaaaataatgagttatctgtcacaaactcaaagccaatacactgaatggacacacagaagttggaagcatttctctttgaaaactggcacaagacaaagatgccttctctcatcactcctattcaacatagcattggaaatactggacagagcaatcaggcaagataaagagaaagaaagtcagactactcttgtttgcaggtagcatgattctacacctagaaaaccctatagcctcagcagaaaattttttttttttaatttttattttatttttttgagacggtgtcttgctctgtcacccaagctggagtgcagtggcacaatctcagctcactgaaacctccacctcctggtttcaagcaattctccagcctcagcctcctgagtagctgggattacaagccacacaacaacgcctagctaatttttgtaattttagtagagacagggtttcatcatgttggccaggctgacctcgaactcctgaccttgtgatccgcccacctcggcctcccaaaattgctgggattacaggcatgaaccaccacgcccggctccagaaaagcttttaaactgacaaacaacttcagcaaagttttagaatacaaaataaatgcacaaaaatcagtaacatctctgtacatcaacaatattgaagccaaaagccaaatcaaaaacaatcctatttgccacaaaaagaatcaaatatccagaaatatagctaaccagggaggtgaaagatctctatgacaagaattttaaaactgcttcaaaaagtaagagatgatacaaacaaatggaaaacccgtttatgctcatgaatagaaaaggtatcattaaaatggccaaactgcccaaagaaatgtacagacttaattctgtttctgccaaactaccaaaaacattcttaacgggactaaaaataactattttaaaataaatgtggaactaaaagagagcctaaatacccaaggcattcctaaacaaaaagaacaaaactggaagcagtacattacctgacttcaaactataccacagggctacagtaaccaaagcagcatggtactgttatagaaacaaactcatagacaaatgcaacagaatagagagcccagaaataatgccacacacctacaaccatctgatcttcaacaaagcttacaagagaaatgtaaaaaaaaatttctatttaataaatttgctaaaataactagctaatactacgtagaaaactgaaactggatgcttttcttacaccatatacaaaaatcaactcaaagtgaattaaagtcttaaacttaaaatgtaaaattatttttaaaaaaactttggaaggtacctaggaaatcattctagacataagaaccagaagatttcatgatggagataccaaaagcaattgcaacaaaaggaaaaattgacaaatgggacctaattaaactacagagcttctgcacagcaaagaaaactatgaacagactaactaaacaagacaaccagccaggcgcagtggctcactttaggaggccaaggcaggcagataacaaggtcaggagttcgagaccagccgggccaatatggtgaaaccccatctctaccaaaaatacaaaaattagctgggcgtggtggcacacgcctgtaatcccagctactcaggaggctgagggagaagaattgcttcaacctgggagatggagggtgcagtgagccgagattgtgccactgcactctagtggggcaacagagtgagactccatgtcaattgaaaaaaaaaaattatgtggtaaacaattagtcatatgaaaacacttctaggaggtaccaagtttcatctcataaaatttagcattaaactcagaaatcaagatgataggatatagaatacagataatcacctctacaaatttaccctgcaaagagagtaactgatgtttttatgaatctgtgtaactcaccacttatataccacgttttcttataaaaatgtattaattttgtacagccaaataaaatagattttccctattcttttccttggtagcattctaaaagctaagccttggaattctgttgaaaatcacccagccataaaataaaagacacctgagaagattcctaaactcactctgggaaagagaaaggtaaatgataatttttattttattttatttatttattttttaaacagagtttccctcttgtcgcccaggctgagtacaatggcgcgacctcagctcactgcaacctcggcctcccaggttcaagcgattctcctgcctctgcctcccgaagtagctgggattacaggcgcctgcccctgcacccagctaatttttttgtatttttagttgagacgggatttcaccatgttggccaggctggtcttgaactcctgacctcaggtgattcacccacctcggcctcccaaagtgttgggattataggcatgagccactacacccaggctgtgacactgtagcacacatagccatggtggttatcttggtttatccctagacagtactgaaacccaggatcagaaaaaaaaaacaaaaacaacaaaatgaagtgtggctgaggaaaaatcacccacatttttcgaaaggaaaaacttgacctaaaaacattctgaaaaagtctctggctgggtgtggtggctcatgcctataatctcagcactttgggaggccgaggcaggtggatctcctgaggtcggcagtttgagaacagcgtgaccaacatggggaaaccctgtctctactaaaaatgcaaaattagccaggcgtggtagtgcatccctgtagtcctagctactcgggaggctgagtcagcagaatcgcttgaacccaggaggcagaggttgcagtgagctgagatggctccactgcagtcaagcctaggcaacaagagctaaactccatcttaaggcggggcgggggaaaaaaaagagtcctgtgcctagggaaaacaaaaagaaaaaagaggccaggcatggtggcggaggcgggtggatcatctgaggttaggagttcgagaccagcctggtcaacatggaaaaaccttgtctctaacaaaaatacaaaaattagctgggaatggtggtaggtgccggtagttccagctactggagtggctgaagcaaaagaatcacttgaatcagggaggcagaggttgcagtgagcagagatcacatcactgcactccagactgggcagcaaagcaacactgtctcaaaaaaaaaaaaaaaaaagtaaagaaaaaaagaaaaggaaaagaggcacagagatttttattttttacaaacagtgtaaggggattattttttgctttcttttcaatatggaaaatattttcaaatagaaaacaaaatttaggccggactcggtggctcacgcctgtaatccttgcactttgggaggccaaggcgggtggatcacaaggtcaggagttcgaaaccagcttggccaacaaggtgaaaccctgtctcaactaaaaatacaaaaaaattaaccaggcacggtggcaggtgcctgtaattccagctactcgggaggctgaggcaggagaatcggttgaacccgggaggttgcaatgagctgagattgcaccattgcactccagcctgggaaacaaagcgagaggaaggatggaagcaaggatggaaagatggaaggaaggaaggaaggaaggaaagaaagaagaaggaaagaagaaaggaaaatttatttaagtccatccaatgatttttcaaaaaataattaaaatatctgtatcaaaaatatacagatatctaaaatatctttatctaaaacgtatctctgtatctaaaatgtacactaaaaaaaaaaaaaaaatagcccggctcggtggctatttttaagtgctgtaatcctagcactttgggaggctgaggcgggtggatcatctgagctcaggagttcgagaccacctggccaatatagtgaaatcccgtctttactaaaaatacaaaaaaaattagctgggtgtggtggcaggcacctgtaatcccagctactaaggaggctgaggcaagaaaatcgcttgaatccgggagacggaggttgcagggagccgagatagcaccattgcactccagcctgggcagcaaaagcgaaagtccatctcaaaaaaaaaaaaaaaaagaaaaaaaagaaaaaatagttgataacgtgaattgcggagaagaaggtggcatttgggaatgtcagaaataaaggaaaatctagtttagtttttttttttttttttttccagagggagtttcactctgtggcccaggctggagtgcaatggcgcgatctcggctcactgcatcctccgcctcctgggttcaagcgattttcctgtctcagcctccctagtagctgcgattacaggcgcgcgccaccacgcccagctaatttttgtatttttagtatagacggggttcaccatattagccaggctgctctcgaactcctcacctcgtcatccacccacctcgacctcccaaagtgctgggattaaaggcgtgacccaccgcgcccggccgactctcctgtttctaatagaccaaaagagggactagaaatgccacggaccaaagctcttcctattcatgaaactgcatcacgagtcaggattctctcctgacgaccctcctgtggcccctgcacaatttgggagagacgccgcgttgcggctgcagagctgcccacagagggctgcaggccgggacacagtcactgcgcagagaagagacaggacgcccggggctgcctcccagagcagccgccatcttatggctgaaggggattgaggccgagctgggcaagaactccggcacgcgcagattgtggagctgactgcgggaaggcctgagtcacgccacagccccttccccctctcgggatgtcggaccggcactctcaccatttctaggcttccggggggtcctggcgtcttagctgtggatcccccaatacccgcaggtcacagagccacagaggctggacctctagcagcagaggacacagaagaacgaagacgagacgcagagctccaactgcagccagagacaaaggccccgccacatcccggaagccgccctgtcctctcctgccccgtgcctgattggacggtttccagcccagcgtccctgattggataacttctaaggtcctgcccccgcaaaccctgaatgaaagatgtgatcagacgctgggctgaaagaagaaagaatgacagcctaggctgccgccttttcaggcagggcttcctccctgagcagagcaggcccaacccagagggtatttgcctttaaccttgtgtataaggtcatcttcacttataagtaatatactatatggatactaaaaaatgaaaacaattgtttttgaatttcagcttttatgaccttcctggcttctggccctttgagtaggaagtattacaaacattgaatattttattatttatcctctgtggggtttttcttattcttgagagggagtctctgttacccaggctggagtgcagggtcatgactgcagctcactgcagcctcagcaatctaggcttgagcaatttacctgtctcagccttctgagtagctgggaccactggcatgtggccccatgctcagctaatttgttatcatatttttatttgtagagatgaagcctcactagatagcccagaatggtctcaaactcttgggctcaatgaatcctacaaagtcagcctcccaaagtactgggattataggcatgaaccatcacattcagactgaattattttatcaaaaaatttttttaaagcattgaggtccattaatagaattcaaggaaatgttatgcacatgttttaaaagcaaattaaaaagcatatacaaaaagagaacattttttaaaaaactaaatataggtaatgttaccagaaaaagtttagatctcctgactttaagttgcagtatgctaatggaatattcttagtggatagtattccattttcataagaaattcaaaacaagataatttccaggttttagaaactgatgtaaaacataaaaatatagaaaatctctaatgtgttcccatgatatagtattacttgaaatataaactgggcaaactcagcaaaagacaatttaatctcaaatttcaaaataggtacagaagttctaatggaataataaatggaatccaggattttattcataaaaaggctaaaaagtgaccattctctgtgattttgaaagtaggaatttgtgtaaacagatgtgtatttgcatctacatttgcctacacttactttttttttttttttttttttttttttgagacggagtcttgctctgtcgaccaggctggagtgcagtggcacaatctcggctcactgcaacctccgcctcccaggttcaagcgattctcctgactcagcctaccaagtagctggggatacaggtgcatgaccccatgcccagctaatttttttatgatatattcatttattcagattactcgataattaaaaattatattttctatgaataccagctaattttttgtatttttagtagagacagggtttcaccctgttagccaggatgtctcctgacctggtgaactgctcgccttagcctcccaaagtgctgggattacaggtgtgagccaccatgcccagcagcttttaaacattttaggaaagcatgagacatcaatcaatatgtataagatcttccttccctacctttttccttctccacctcctccttcctctctctctttcttggtttgatccagtaatgcaggacaacttgaggtgagggcttccaggtcataagtaaataagagataaaagtctggattcttgagtccttgataagcattcaactgaatacaatttagtctggctcagtgaacctgcatatctaaattaacagcagtgcagaggaagcaatcagatgtgcatttgtctcaggcgaggctcagagaaatgactctgagttctgtctgtctttggttctcaaggaatttccttgttggctaattgtaaagaaagtatgtagcttttttatctttgtagctatcttatttagaaataaaatgggaggcagatttgcctgacatagttctcaacttgacttttctagtggcttagtaattttggcatcaagagatttattttcctttagcagtggaaacctctttcattatcaagtgtagaggttaataaaaaaaactcataaacacaaatataattattgctacatctttcagaatagcccattctaaatttttttttttttttttggagatacagtctcgctctattacccaggctggagtgcagtggtgcaatctcagctcactgcaacctccgcctcctgggttcaagcaattcccctgcctcagcctcccgagtagctgggattacagatgtgcgctaccacacctggctaatttttgtatttttagtagagacggggtttccccatgttggccaggctggtctcaaactcctgacctcaggtgattcgcccgccttggcctcccaacgtgctgggattacaggagtaagccaccgcacccagggtagaatagcccatcctaatttaattctcatttactctagacttttttcataattttatagtggatcttaatgttggaggcattcaaaccagagcaactcaatcttgaatagcagctgtgtgaaatatgctgaaacctacttggctgcctccccaggttaggcattcttagtcacaggatgagataggaggtcagcacaagataaacaagatacactgcacttagaaatttgtcgtaatcttctctgttagcagggtgcaggcagaaacacagaatcacatatttagatcatggatgcagagatatgtcacaaagctcctgtggttagggtcaagaaaggagcttcccaccccctagatgttggtctcagcaatatatcacaatacccaaattatgtgagacccaggcaaaaaggagagtcacatcacctaggtgctgggtccagtgatatttcacaattatcctttgtagcaggttctagtcaaaaaaggagagtcacaacatttaagtgatgaagaaaaaagaatatgtcataatacctttctgaacagagcccattcaggagactcataatacctaggtgttggacccagccatatatatcacaatacaaaatgtatgcagagatcaggcaaaaaaaaaaaaaaaaaaaaaaaaagagatcacataacctaagagctgggcccagctacatatcacaagcaccccagtggacaaggccaaaacatgagagaagagtcacatcacataagtgcttgactaagcgatatgttacagtccaaactgtgaacacatcccaggaataagaggagtcacatcatctaagtaatgggcccagagatatgtcaaagtaactcctgtggagaggaaccaggcagaagaatcacatagcctgtgtgctaatcgcagcaataagtcactctcttttatgggagcatggccatagcaggaaagaagggtcaaattatttggtttctgggctcaaatatatgtcacaatctctcctatagggaaaagccaagtaagaaagtcacattatatggatgatgggttcacaaatatgtcactatgcccactatgggcagggttcaggcaggaggctcacattaccttagttctgggccaaacaatatgtcacaatgcctgatgaggaaagtgctgaggaaaaacgtaacttcatttttggtgtttagcccagcagtatgtcaaaatctacattgtgagctgaatgtaggtagaaaaagaagcatcacaacagctaggtgctggcccagtgataggtaacaattctttctgtaagcagcaacctggtagaaagagagtcacattacttgggtgatggatgcagatagattataatgcttcctgcaagcaggatccagcaaggaaagttacatcacctggatgttgcacatagcaatgtcacaatggcccatgaagatagggcacaggcagaagagtcacataaccagggtgtggggtccagtgatatgtcacaatgcccccctgtgggcagtgctgaggcaaaagtacagagtcacaccacctagatgttggattcagcaatgtgtcacaatccgatctgtgcactaggcaccaggcaggagagtcaaatcactcaggtgctgggcaaaggtgtatgttacaatcacagtcacaaaaaaatgtaggaatgaacaatcccacacatcccatttcttagtattagagtcaacacatgttgtatgttgagtccaagtacacaagtcacaatctcaacggtggactggatacatccatgagagcctcaatctttgccgtggactgtgtccccttagtggagtcacagcctcacaggtatgctgaatcttggtttgagagtcaccagcccacgtgtgaaccgaatccacgtttgagagtcaattttccaaccacctccaggtgtgagattcagaacttcaacagtgagctgtgttcatgtggaaagttgtcaattttcactgttggctgggtttgcatacgagtgtcacaatgtcacctgggtgctaggccctgttatagaactctctatactacctgagggctttatacaatatccatgatggtcacaatttgctctgagacttttttttctaatacaaactcataatcatacctgtggacctaggctcatgcattagagtcaacatctctccaattggctgggtctagagaaaagagttctcacctgcctatgagctaggtttagaaatgagtcaccatcttaactgttgtcacatgattacatatgacagtcacaatttttactgtggactccattcacgtgtgaaattcgtgtgagggtgacaatgctaacatttggtaggttgtgcatttgagaaacagtctcacctgtgtgcttggccctatgataacactctctgtaccgtccaaagactttatacaaaatgtgaaagaatggtaatccaggactttacctgtttctctaagtctagctaccagcaccagtatctctgctatggactggtttgtggtatgagtatcatcatcgcaactgtgaactgggctaaagtgtatgtcacaatctaacctgtgagtagaaagtaaatgggagagtaacatcacctgcatgctgagtcggaaatatgtcacaatttttcaggacaaggaccaggcaggagagtcatattacctggttgcctgtccagggttatgttacaattccttctcgaaagcaaggcacagacaacaaagtcacgttacttggtactggacccagctatgtcacaattctctctgcaggcaaggcctgggcacaagaaacacagcacctggttgctgaacccagagatgcaacacaatctttctctgggcatggtgcagatggaagaggagagtcacacctccaaagtaatggatgcacagatatgtcacaaggtgcttcccacagacagggcccaggcaagagctctttacccatttggtttgagccactgatgtgtcataatacccacaatacaaggggcccaggttaaagagagtgatatcacctagatacagagtccagtgatatgtcacaatcctccccttttacagggttcaggtagaagttacatcacttaggtgataaacaaatgacatgtcataattcctctattagcaggtgaagagagtcccatcacctaggtgttggactagccatattttaatatatacaatacacaattcaccaatacctaggtgaaacaaattgtgtatattgaaatatggcagggtccaacaactaggtgatgtgactctcctgcatgggccctgctaataggagaattatgacattatctttctgtttatcacctaagtgacgtgactctccttttctaactgaaacctgtagtaggagaggagagtcacatcaccaaggtgctaggcccagtgaaaaatcacaatccctggccaggcatggtggctcacacctgtaatctcagcactttgggaggcagaggctggtggttcaccaggtcaagagaacgagagcatcctggacaacgtggtgaaatcctgtctctaataaaaatacaaaaattagctaggtatggtggtgcatgcctgtagccccagctacttgggaggctgaggcagaagaatagcttgaacccgggaggcagaggttgcagtgagctgagatcgtgccactgcactccagcctggcaacaaagtgagactccatctcaaaaaaaaaaaaaaacaataaaataaaaaaatcacaatcccgccttgggcagaaaccaagcagtagacgagggtcacatcaccttgttactaggtcaaaaaatatggcacaatattttctgaaaaaaaggggaccgtgcagcacagtcacctcatctaagagagggctccagagatatgtcaaaatgccctatgtgggtaaggctcataaagaagagtcacataacctaggaattgagactagttatatggcacaatcaccccagtgggcaagactgaggcatggaacaaaattcagattatgtagatcctgagaaaagtggtatgtcaaaatctccactgtggacaagtttcagagacaaaaggagagtcatataatctagtttatgggcccaggcaaatgtcataatgtcctctctggacagggaccaggcagaaaaatcacataacctgtggtcagggcctagtgatacgtcaccccctcttctgtggtcagggcccaggcaggagagaagagtgagatcatgtaggtgcttggcacagatatgttacaacgtctcctagggaaaagcccatgtaaaggtgaagagtaacattaaatagatgggtccagaaatatggcaaaatgtcccctgaagccagggtctaggtaggagattcatatcatctgggtgttagatccagtaatatgttacaatagcccatttgggcagggcacagaaaggagaaacacattacctgggtgcagggaccagtgatatgtcacaatgccctctgcgacagcaccaaggcaagagtatagggtcacatgatctacatgctgggtccagcgatatgtcacaatcccatctgtgtactgggcccaggcaggagagtcaaatcgctcacattctgagcagaggtatgtgtcacaatcacacctgcagaaagacccagaaatcagataaaacagttcttcacgtgtcttcattctaggtatgagtcaataccatttggatattgggtctaagtacacaagtcaccatctcaatgtagatgaatccatgcataacaacctcaatctcttctgcggactgtgtctcttagtaaaatcatagccttggccaggcgtggtgcctcacacctgtaaccccagcactttgggaggccaaggcaggtggatcacctgaggtcaggagtagagaccagcctggccaacatggcaaaatctcatctctactcaaaatacaaaaattagctggatatggtggcgggcgcctgtaatcccagctactagggaggctgaggcaggagaatcacttgaacatgggaggtggagtgagccaagatcatgccattgcactccggcctgggcaacaagagcgaaactcggtcttaaaaataaaaaaataaaacagcctcacaggtgtgctgaatcttgacctgagagtcaccaatccatctgtggaccagattcacctataagagtcaattttgcaattttccactgcctccaggtgtgacattcagagcttcagaagtaggttatgtttatgttaagggatgacaatatttactgttggctggttgcgcatatgagtataacaatgtcacctgtgtgctgggccatgtaagggcactcagtgtattacccgagggctttatacaatatacaggagagtcaaatccactctgagatctttgtgattgtataaaaccatgatcgtacctgcggccctaggcccagactggggcaggtggatcatgaggtcagtagttcaagaccagcctgaccaacatggtaaaaccttatctctactaaaaatacaaaaaagccgggcatatcccagctgctcagaaggctgaggcaggagaatcacttgaacctgggaggtggaggttgcagtaaggtgagctcgtgccactgtactccagcctgagtgataagggagactctgtctcaaaaaaaaaaaaaaaaaaaaaaaaagatacacaaaacacaatttcatctgtgtttttggcttgtgatgacactctgtgccacctgagagctttttataatatctgagagagtggtaattctccatgacctttgcaaaaaaaaaggaaacttagaatcatgtttgttttctcaagcctagctaggcaaggtgtatctcttttattgcctggttcaaggtatgagaatcatcatagtaatttgtaagctcaggcaaaatatatgtgacaagggccgggaaggtggcttacacctgtaatcccagcactttgggagaccgaggcaggcggaccatgaggtcaggagatcgagaccatcctggctaacacggtgaaaccccgtctctactaaaaatacaaaaaactagccaggcatggtggcagacacctgtagtcccagctacttgggaggctgaggcaggagaatggcatgaacccagcaggtggagcttgcagtgagccgagattgctccactgcactccagcctgggcgacagagcaagattccgtctcaaaaaaaaaaaaaaaaaaaaaaaaaatatatatatatatatatatatatatgttacaatgttacaattacacctatgggtaaagagtgagcaggagagtcacatcacctggggctggtctagagatatgtcacaatcttttttgagtgcaaggacgagacaggagagtcacatcacctaggtgcttgggcagggatgccttaacatctcttcttgtaagatgggcacgggcagcaagttacaccacctgggtgcagggcccaacaatatgttacagtgctctctatgagcaataccctgagaggtgagacacattatctggttgctgatcccagtggtatgttacaatgtttttggggggcatggtgcatgtaggtgagaaaagtcacatattataattgatggatgtcaaaatatgtcacaaggccccctgtgggcaggcccaggcagggacctcccatcccctaatgtcagactcagtaatatgtaacaatacccaaaatatgcaaggtccaggcaaaagatgagagttacgtcatctaggtgctgggtccagtgatacatcacaatcctcttttggcagggtgcaggctgaagaagagtcacatcacctaggtgatgaatgaaaagatatgtcataatactctcgtgaccagggcttatgtaggagactccttggtgatagacccaggtacatgtcacaatatgtatgcaggggccaggcgcagtggctcacgcctgtaatcttagcactttgggaggccgaggcgggcagatcacctaaggtcgggagtttgtgaccagcctgcccaacatggagaaaccctgtctctactaaaaatacaaaattagccaggtgtggtggtgcatgcctgtgatcccagctacttaggaggctgaggcaggagagtcgcttgaacccaggaggcagaggttgtcatgagccgagattatgccattgcactccagcctgggcaacaagagcgaaactctgtctcaaaaaaaaaaaaaaggatgcagggcccagacaagagaagagtcccatcatgtaggtgctgggcccagtgatacatctaaatctttttttgttcagagtccaagcagtagagaagaagtcacattacctaaatgctgcatccagcaacatgtcacaatacccggataaggagagcccaggcagaaaagtcacatcacctaggtgaaaggcccaggggtatttcctagtgctacttgtttgcagagctcaggaagaagacaagagtcagataacgtaggagctggtagcacaatcactacagtgggcagggtctagctatgagaggagagtcacatcgcatgggtgctgggccaagcgatatctcacatttcttactgtggacagattcagaaataaaaaggagacctattatttaggtgattggcccagagttatgtcacaatgaccacctgaacagggaccaagcataagaatcacatcacctgtgtgctgggccaaacaataagtcactctcttttctgttagcacaacccaggctcaaagatatattacaatctgacctatggacaaagcccagataaaagaggagagtcaaataaaatagttgatgagcttagatatgtgttaaaatgttttctgtaagcatggtccaggcaggaaactcacatcacttgggtgtaaaacccagcaacatgtcacaatgtcttatgtgagcagggccaagaaaaaaatagagtaacatcactttgatgctgggttcaccaatatttcacaatcttccctggaggaaaaactaagaaaaaaaaatcaaatcagctatgtgctgcaaaatgtcacagaacttcctgtaagcagaaaccaggtaagacaagagagtcaaatcacctgtgtgactggtgcaaagacatttcaaaatgccacccctaggcagggtccaggcataaaagttatatcacctggctgttggacccagcaatatgtcacaatggcccaagtggccaaatcgtaggcagaagactcacatgtcagtgcagggcctagcaatatttcataatgtctgctgcaggcaaaacctaaaaccagggaaaaatcccatcaggtaggtgctgggcgtagcaatatgctacaatgttcctgtaagcagggaccagacagaagaagactgtcacatcacctggatgctgggcccagagatatgtcaaccatcatttctgtaataaagacccatgcagaaaaaacacagcatctggttgctggccacagcaatgtgcctcaattttccctgtaggcagggtgcaggcagaagaggagagtcacatctcctagttgatgaatgcagggacatgtcacaatgctccctgtgggaagggcccaggtaggagacttccgacctttaggtgttcagctgagcattatgtcacgatacacaaatatgaagggcctaagaaaaataagagtcacatcaccttgatgttaggtctctgtgagcagagaccaggcaggagaagaaagtaacattactggtcaggcgcggtggctcacacctataatcccaatactttgggaggctgaggagggtggatcacttgaggccaggagttcgagaccagcctggccaacatgctgaaaccccatctctactaaaaatacaaaaattagctgggtgtggtggcacatgcctgtagtcccagctactcaggaggccaacgcagaagaatcacttgaacctgggaggcggaggttgcagtaagccaagatcacaacattgcactccagcctgtgcaacagagtgagactccgtctccgaaaaaaaaaaagaaagtaacatcaccatggtgacgggcatcattgagttacatcacaaagctccatgtaggcagggtccagagaaaaggtgttacatcccctgggtattggacccaacaatatgtaacaatttcttttttatttttattttttgagacagagtctcgctctgtcacccaggctggagtgtagtggcgcatcttggctctgcaacctccatgtcccgcaattctcctgtctcagcctcccaagtcactgggactacaggcacacaccaccatgcccggctaatttttgtatttttagtagagacgtttcaccatattgatcagactggtcttgaactcctgacctcaggtgatgcacccgcctcagccttccaaactgatggcattacaggcgtgaggccactgtgcccggccttatatgtaacaatttgttgttgttgttgttgttgttttttgagacagagtcttgctctgttgcccaggctggagtgcagtggtgtcatgtcggctcactgcaaccactgcctcccagattcaagtgattctcttgcctcagcctcccaagtagctgggattacaggcatgcgccaccacacgtggctaatttttgtattgttttagtagagatggggtttcaccatgttggccaggctggtcttgaactcctgaccttaactgatccactcatctcagcctcccagagtgctgggattacaggcatgagccaccatgcccggccatatgtgacaatttctaatgtgacatattgtgccataatatggcacaacatgtagggcacaggtgagagagtcacataacatgggtgcaggattcagtactattttacaatacccaaaatttgtgaggtcccataaaaagaggagagtcatatcacctaggtgctgggaccagtgatatgttacaattttacctttgggctgggaccagacaggaaactgaaatcactcaggtgctggccaatgtcacaaccacacctgcagaaaggtccagtgatcaattaatcccgtacaggtcccagttctaggtatgagagtcaccacattctctatgttgggtctaagtacgctagtgacaatttcaccaatgaattgaacctgtgcataagagcctccatctctcttgtgagctgtgttcgctctggccctcagcccaggtatgagtcaacatgtcctcaggaaggtagacttctcattggttcagattgaaaaattctcacctatgaactagatttagaaatgagtcatttttcaaactcctgcggaatgttcacatataacagccacaattttaacggtggactgtgtctgtgcatgagattcaggacctcaccagtgggctccatcactgtgtgagggtgacaattctaacggttggtggggtgggcaaagaagaaacacaatctcacctgcttgctgaactctataatgacactctctgtaccacgagagatttatatagtattcaaaacagtggtaatttggctgggcacggtggctggcgcctgtaaccccagcactttgggaggccgaggcgggtggataacctgaggtcgggagttctagactagcctgaccaacactgagaaaccccgtctctactcaaaatacaaaattagccaggcgtagtggcacatgcctgtaatcccagctactcaggagactgaggcaggagaatcgcttgaacccaggaggcggaggttgcagtgagccaagatctcgccattgtactccagcctggacaacaagggcaaaaccctgcctcaaaaaaaaaaaaaaaaaaaaaaaaaaagtggtaattctcagttgggcatggtagctcatgcctgtaatcccaacacctggggaggccgaggtgggtggatcacctaaggtcaggagttcaagagcagcctggccaacatggcaaaatcctatctctactaaaaatataaaaattgcccaggaggcggaggttgcagtgagctgagattgcaccactacactccagcctgggcaacataaacgaaactccatctcaaaaaaaaaaaagtaattctctatgacatttgtacaagaaagagacccaggataatactcataaccctaagcctagctataagaggcagcatctctcttactggctggttgagggtagaagagtcataattgcacctgcaaactgggccaagctatatttcacaatcccacctgtgaatagggagagaggagtcgcatcacgtgcgttttgggtcaggaatatgtcacagtcttttctgagggcagagaccagacaggagtatcacatcacctgaatatttagccaggaatatgtaacaaacttcctctgaaagcaggacacaggcagcagagtcacatcacctgggtgctgagcccagcaatggataacaatgctctctgtggtccaggcccaggcaggagagacacattacctgagtctagtgataagtcaaaatttttcctgtaggcagagtgcaggcaaaaatggagagtcactctcctaggtgattgatgcagagatatgtcacaaggccctctgtagaaagggcctgggcagggccagacacggtgggtcacacctgtaatcccagcacttcgggaggccgaagcaggtggatcacgaggtcaggagttcagaccagcctggccaacatggtgaaaccccatctccactaaaaatacaaaaattagccgggcatggtggcaggcacctgtaatcccagcacttcaggagactgaggcaggagaatcatttgaacctgggaagcggaagttgcagtgagccgagatcgcaccactgcactccagcctgggagacaaggcgattctctgtctcaaacaaacaaaaaaagaaaaagaaagggcctgggcaggagcctcttattgtataggtgttagacctagtaacatgtcctaacgtccaaaatattcagggactaaggaaaaaaggagagtcacataacctgagagcagggcttagcaatatgtaacaatgcaccttgtggacagtgccaaggcaagaaaaaagactcccatcacctcagtgaaaggcccagctatgtgtcacaatgccatctgtgggcagcaccaaagctggaaaaaagtcacatcttcaaggtgcaaagtcaagcgatatgtcacaatctccatctgtgggctgggccaaggcaggagtcaaatcactaaggtgcttagtagatgcatgcaatcttacctgcaggaaagtccaggaatgagattagaaattccacacatgtccaggttccaggtatgagggtcaacacctcctgtatgttgggtctgtctaagtacgtgagtcacaatctcaatggttgacggtattgcaagagagccacaattttgtctgcggactgtgcttttcagtgcagtcacagcctcacatgtgtactgaatcttggtctgagagtaaccaacccacctgtggaccaggcccgcatatgaaagtcaattatccaacttttgacagcctccgagtgtgagattcagaaatgttcctaagaggccgggcgcggtggctcacgcctgtaatcccaggacttttgggaggctgaggcgggcgtatgacctgaggtctggagttcgagatcagcctggccaacatggtgaaaccccatctctagtaaaaataaaaaaataaataaataaaaattagccgggcctggtggtgcgcacctgtaatcccagctaatcggaaggctgaggcaggagaatcgcttgaacctggaggcgaggttgcagtgagccgagatcgcgccactacatttcagcctgggcgacatagcaagattccctctcaaaaaaaaaaaaaaaaaaaaaaaattaacaacagaaactgaagaccccagggccgcagctcctcctgcgcacacaccgagtcgggattctgccccgatcatccgccgggcatccctgaacaatctgggaaatactcggggctgctggtgcagagctgaccagagagctccagacagggtaccgcgcaggaatggggcgggacgcgggaggctcggctgcgggcccagccgccatcttgcggccagaggggcctggggcggagctgcgccagcgaccaggactcaggagcggactgtgaggaggccggtcccgccactttcacagcctgctctcccctctcgggatgcctaaccccgcacactcaccatttcccagcttccaggatgtccgggcatcttagctgtgcgtctcccaggacttgcagatcacagggtaacggaggctgcgacaaagtcaccggggattcccgagttggagaacgcggaaaagcagaggcgggtcccaaggtctagcgggagctggagacaaaggccccgccaaaagccggaagccacggccccctctccaactgcgcgtctgattgggtggttcccacgccagcgccactgattggataaagctccaggacccaccctccctagcgtttgcgcattttatggacagggaaacaggctcaagtaggcggggcacatgcccagggaattacagctaatcaagtgagctgagccttgaaatgcacttgcttttttccttccctgggtcagcttgtatagtgcatcttagtagctactgaaggggaagaaacagaacatttggatacccttttaacaactttttaattatgttgacaatgcagcaaagaccctcgtcccatccctgagggtctctctcaccgtgctgtaccacactgctgtacacatcttgggatgaccattaggaacggggaagcagctggggctagggatagataaacatgaattatgttgcctaaatttgctcattttagaaaaacatctaaaccaatctctgtgaagtggctattatcagggtaattgtgccctgactgtgctacatctcaatctgacttctctttttttaaaataactgcattactctcattaacggggttatttcactttctattggaaaatcgccaattgtcctctgtaggtgtcctgatgtaatttgctagtttagaccctggaggtagggataagaaaatacttgagctacatcagaacacctaactcaactggaggatatatagaaattccttaataatatctaacagttttctcaatacccattatatttaacagtgatagcttggagggctgagaggtgaaacagatgacacaaccttagaagttcacttttgttgccggcgtggtggctcacgcctgtaatcccagcactttgggaggccgaggcgggcggatcacgaggtcaggagatggagaccatcctagccaacatggtgaaaccccgtctctactaaaagtacaaaaaaattagccgggcgtggtggagcatgcctgtaatcccagctactcgggaggcagagccaggagaatcccttgaatcagggagttggaggttgcagtgagccgagatcgcgccacagcactctagcctagcgacagagcgagactccgtctcaaaaaaaaaaaaaagattgtcttcatccaagccagtttccatttcttggacacacattgctggtcagccaatcagatgctggtattgaggtgaaaacagaaacgatttctgcctctggattctctgagattcgtgggaaaaatggtatccctaaaaaacaaagcaagacacaaaaacctgaccccggtgagatggtgcaagaacttgcaaagtaaaatgcacttggaaactccctgggacatagtgcagtgtctcctgagaggtcataaaagaggtgggtttcagaaaataaatctaatcacgcattccatttgtttaaaattctcatttaccctttttttttttttcctgtaaggtgtgttttttatggctgagtgaatttcaaacagaattccaaggcttatcttttaaaatgctaccaaagaaaagaataggtaaaatatattttccgttttggctgtaaaaaatgcatacattaaaaaaaaagtggtagataatgggcaagttacaagattcgcaaaaacatcagttcctctttgtgcagggtaaatttgtgacattgactatacctgttctacatcctgttatcttgatttctgggtttaatgtcaaattttgtaagatgaaacttggaacctactaaaagtgttcccatatgactaattactacatgatttttaatggaaataatataataacacacttattgtctgaaaggaatagatacttttgcttttcttactgaggtatgaaatgtaagcaccttaaaatttcctctttttttttgtggcagagtctcgctctgtcgcccaggctggagtgcagtggcacaatctcggctcactgcaacctttgcctcccgggttcaggcaattctcctgagtagctgagattacaggtgcctgccaccatgcctggctaatttttgtatttttagtagagatggggtttcgccatgttgttcaggctggtctcgaactcctgacctcaggtgatccaccctccttggcctcccaaagtgctgggattacaggcatgagccaccgcacctggtctcctttttttatataaacactgtttgggtaatttcgctggatttttcaaacacttaaacttccaaaaaccaagtgaataactctgacatggaaattaaagcttgcacccagtgactccaagctaaagctaatattgatcctgcaataggaggttattaaaggcccagtttgttcttccttgggagcttcctgggcagatgtccaagtcctgaaagaagactatatactgagagaagctacagagccctggaaagctggggacccacaggcagatgcatttaaggttaagatggaaggggactgacatactcttttttttttttttttttttttgtgagacagagttttgctcttgttgcctaggctggagtgcaatggcgccatctcggctcactgcaacctctgcctcctgggttcaagtgattttcctgcctcctgaatagctgggattacaggcatgcaccaccacgcccagctaattttctatttttagtagagacggagtttctccatgtgggtcaggctggtctcaaacttctgacctcacgatccacgtgcctcggcctcccaaagtgctgagattacaggcatgagccaccgcgcccggcctgaaagattctttttttttttttttttttgagacagagtctcgctctgtcacccaggctggagtgcagtggcacactctcggctcactgcaacctccacctcccgggttcaagtgattctcctgcctcagcctcctgagtagctgggactacaggcgcgtgccaccacgcccagctaattctttgtatttttagtagagacggagtttcacagtgttagccaggatggtctcgatctcttgaccttgtgatccacccgcctcagcctcccaaagtgccgggattacaggtgtgagccaccgcacctggccccctgaaagattcttcctgaagataatattgttcttgttttgaggccgtttctaaaagttgtaaaataaaacagatttatgtagaataatttaaaatccaaagaagtattgaaacaggaagaagtactaattataagagcattaaggattgcaaaggataggcagaccagggctttctttcatagggaggagcaaacaagatttaaagataaggtaggaggagaatggcaaatggagagtgaaaaaaatcagattctggttcaggagaatcttaggagggacataaaatgggattgtattttggctcagactgagggtagggtagcttaaagttcaggagtctgtgggaaagaaataaacttaagtgaggtttgatttagaagtagtttattttgactgctgaagacaaatttagctgattttttaatgagaacaaggagaaaatgtgcagagcctatttctggctatgtggtagcaccctgtaattcataattggaaaggaatttatgttcttcgtctttccccaccttttttttattctgtacattttttccatttcagttttcctgagttgtatcttatataattaactggtcaccataactgcagtgttttgctgagttctgtgagtagctctatcaaattatttaacttgagggaggttatggaggtcctcactttttcaaaagtacctcagaagcatagataagcccgtggggtttgtgagtggcatctgcactaaggaaaaacttatggaaccgaaccctgaatcagggtctgtgttgattctgggtggtatcagaattcaaatgttagacaataggttggtgttggagaattgcttggtgttcagcaaactctataggtttgccagaaaaacaatataatagagacctggcctggaataaaactctgggtgtctggaaatggaaagctctgctctcctgtacacaggctgtcacactgcccattgtcctgtgattccaggtctactaccagtatgagagaagactgaaaacttagaagaaaactactttggccaggcacggtggctcatgcctgtaatcatagcactttaggaggccgaggcaggcggatcacgtgaggtcaggggttcaagaccagcctgatcaacaacatagtgaaacccttctctagaaaaatacaaaaattagccaggtatggtggcgggtgcctgtaatcccagctacttcagaggctgaggcaggagcatcacttgaaccggggaaggtggaggttgcagcgagccgagattgtcgtacctgagcgagttagcaaaacgccacactttgagacgaattaagagtcctttattcagccggcggccaaagagactgctaaagctcaaaattctctcggccccgaggaaggggcttgattaacttttatactttggtttaggaaagggaggggagcttaaatgcaacaactcttcagaagtaaaaacatgcaagaaattaaaaggacaaatggttacagagaaacaaacaacttaaaagacaaatggttacaaaaaaagcaaaggtaccaggtgcggggatctaaatccttcataagagttagatatgggcactactccggacacaaactcaaggctttatggtgttatcttttgagcaaaatcctgggaacttcatacatggtttgtttcggtaccttatcagttaattgaattcttttgatatgttgagaatctgtttacacaagttaactccttgaagaagggggtgggtaaggagtccttaatgtcttgtaaatcacgggggccagatggagttcgtccagcttttctcagctaagggagagtttattcatgtggaaacaagtctaggtgattaagggagcaaaagagagagtctaaaaacagggttagtaaaaacaaggttgggcattataacacttggctgtagggtggacccagtgcaccactgcccacagccactggctggcttctcagttgagccaccagtttgatcacatatgggctgtgagctgcaggtgttacacttggccaccagctccaaatattgaaggtcgaccttaatatttaatatcaaacatttaaatatttacacgcagtagtgtctcctaggtccagcagagggctgtgatcatggctcgctgaggcctcgaacccactcccctgccctagggctcgcccacgtgggcctcccatttccctcttctgaggagctggggccccagtgatcttcctgtgatttttttttctagttccacttccattttctttttgcatcactttagttgttgttttcctttgttctctgtctctttatgctccttcctgcacactaaagttgttgttttaatttctttctttcttcttctttttctttcttttttctgagtgaagtcttctcactgtcatgcaggctagagtgcagttgggcaaccatagctccctgcagcctcgacctccctggtctcaggggttgctcctgtctcagcctcccaagtggctgaaactacagggatagcttgatcacgccactgccctacagcctgggtgacagaagaaaaccctgccagagggagatggggggtacagttaattaggatcttatttacctttgttcactccgttaaaaaaattttaatattgtttgttctttctttgtcacttgttactgtttgtttttattattattattatttatttttatttttagacaggttctcactttgtcacccaggctgcaatacagtggtgtgatcttaactcacagcagcctcaacctcccaggttcaagcaatcctctcatttcagcccccacactccccagtagctgagagtacaggcacacaccacccgccactggctaaccttactttgtgatttgtacattttatttttgtagagatggggttctgtcaggcctctgagcccaagcctgcacatatacatccagatggcctgaggcaactgaagaacaatgaaagaagtgaaaatggccagttcctgccttaactgatgacaatccaccattgtgatttgttcctaccccaccctgactgatcaattaaccttgtgacattccttctcctggacaatgagtctcagaagctcccttaccgagcaccttgtaatcccccccaccccgctgcctgcaagagaaaaattccctttgactgtaattttccactacctaccccaatcctataaaactgccccacccctatctccctttgctggctctgttttcagactcagcccacttgcacccaagtgaaataaacaaccttgttcctcacacaaagcctgttggtggactctcttcacacagatgtgtgtgtcatttggtgctgaagacctgggacagggggaatcctttgggagactggtcccctgtactcaccctcactccatgaggagatccacccatgacctttggtcctcagaccagcccaaggaacatctcaccaattttaagtctggtaagcggcctcttttttttctcttctccagcctttctcactatccctcctttcccttcctggtagaaacagaggagaggcattttattcgtgaactcaaaaccctggcattggtcacagactgaggaagacagtcttcccttggtgtctaagtcactgcagggacacctgcctgattattcacccacatttcagggacgtctgatcactgcagggatgcctgccttgatccttcaccttggtggcaggtaccacctccccttggtggcaagtaccacctcccctagatggcgagtaccacgccccctctctccatgtctctaccctctcttttctctgggcttgcctctttcactatgggcaacattccattctccattcccccttcttctcccttagcctgtgttcttaaaaacctaaaactccttcgactaacacctgacctaaaacctaaacatcttattttcttttgtaatactgcttggccccaacagaaactcgataatagttccaagtgggcagagaatggcactttcaatttgcctatcctgcaagacctagacaatttttgtcataaaatgtgcaaatggtctgaagtgcctgacttccaggcattcttttacacatcagtccctccctagtctctgctcccaatgcgactcatccgaaatctttcttctttctctcctgtctgttccttcgatctccaccccgagctctgagtccttggaatcttccttttctatggacccatctgacatctcccctccaccccaggccgctcctcaccaggctgagccaggtcccaattcttcctcagcttccactccccaaccctataatccttctgtcacctcccctcctcacacccagtctgacttacagtttcattccatgactagccctcccccagctgctcaacaatttcctcttaaagaggtggctggagctaaaggcatagtcaagattaatgcccctttttctttatctgacctctcccaaatcagttagtgtttaggctctttttcatcaaatgtaaaaacccaacccagttcatggcccatttggcaataacccttagacactttacccccctagacccagaggggtcagaaggccatcttattctcaatgtacattttattatccaatccactcccaatattagaaaaagctccaaaaattagattccagccctcaaaccccacaataggacttaattaacctcacctttgaggtgtacaataataaagaagaggcagccaaatggcaacatatttctgagttgcaattacttgcctctgctgtgagagaaaaaccacagccacatctccagcacacaagaccttcgaaacacctaaaccgcagcagccaggcattcctccaggacctccttccccaggatctccttccccagcatcttgcttcaagtgccagaaatctggccactgggctaaggaatgcctgcagtccaggattcctcctaagccctgtctcatctgtgtgggaccccactataaattggactgtccaactcacccagcagccactcccagagcctctggaactctggcccaagactctctgactgactccttcccagatcttctcagcttagcagctgaagactgatgccgcccaactgccttggaagcctcctagaccatcacagacactttgggtaactcctacagtggagggtaagtccatccctttcttaatcaatacagaaactacccactccacattaccttcttttcaagggcctgtttcccttgcatccataactgttgtgggtattgatggccaggcttctaaacctcttaaaactccccaactctggtgccaacttggacaacattcttttatgcactcccttttagttatccctatctgcccagctcccttattaggtcaagacattttaactaaattatctgcttccctgactattcccgggctacagccacacctcattgtcacccttttccccagttcaaaacctccttcacatcctccccttgtgtctccctaccttaatccacaagtatgggatacctctactcctaccttggtgactgaccatgcacgccttaccatcccattaaaatctaatcacccttacccgactcaacaccaatatcccatcccacagcaggctttaaaagtgttaaagcctgttatcaccaacctgttacaacatggcctcttaaagcctacaaactctccttacaactctcctattctacctgtccaaaaactggacgagtcttacaggctggtccaggatcgttgccttatcaaccaaattgtcttgcctacccatcctgtgatgccaaacccatatactctcctatcctcaatacctctctccacaacccattattctgttctgtatctcaaacatgctttctttactattcctttacaccctccatcctagcctctctttgctttcacttggactgaccctgacacccatcagcctcagcagcttacctaggctgtactgccacaaggcttcagggacagccctcattacttcagtcaagccctttctcatgattactttctttctatccatctgcttctcaccttattcaatattttgccgaccttctactttacatcccctcctatgattcttcccaacaggagaccctcctgctcctccaacatctattctcaaaaggatatcctcctccaaagcccaaatttctttatcttctgttacctatcttggcataattcctcataaaaacacacatgctcttcttgctgattgtgtctggttaatttcccaaaccccaaccccttccacaaagaaacaactcctttccttcctaggcatggttagatacttttgcttttggatagctgcttttgccatcctgactaaaccatgtaaactcacaaatggaaacctagctgacctcatagatcctggatcctttccccactcctctttccattccttaaaaacagccctagaatctgctcccacactagctctccctaactcatcccaacccttttcattaacacagccaaagtacagggctgtgcagtcgaaattcttacatgagagccaggactgcaccctgcagcctttctgtccaaacaacttgaccttactgttttaggctagccctcatgtctctgtgcagcagctgctgccgctttagtacctttagaggacctcaaaatcacaagctatgctccacttactctctacagttcccataactgtcaaaatctattttcctccttgcacttgatgcatatattttctgccctctggctcctttaactgtactcactatttgttaagtctcccacaattaccattgttcctggcccagacttcagtctggcctctcatcttattcctgatactacacctgaaccccatgactatgtctctctaatccacatggcattctccccatttccccatatttccctctttcctgttccccacccagactgcgcttggtttattgacagtagttcttccagacccaatcgccaatcaccagcaaaggcaggctatgctatagtgtcttccatctatcattgaggctatttccctgtccccttccactacctctcaacaagctaaactcattgccttaacttgagccctcattcttacaaagggactacatgtcaatattgatactgattccaagtatgccttccacatccttcacctccatgctattacatggccagaaagaggtttcctcactacacaaaggtcttcaatcattaatgcctccttaataaaaacttttcttaaagctgctctacttccaaagaagctggagtcattcactgcaagggccatcaaaagatatcagatgccattgctcagggcaatgcttatgctgataaggtagctaaagaagcaactagcattccaacttctgtccctcatggccagtttttctctttctcatcggtcactcccacctactctcccatggaaatttccacctatcaatctcttcccacacaaggcaaatgattcttggaccaaggaaaattcttctttccatcatgacaggctcatttcattctattgtcctttcaaaaccttttctatgtgggttacaagccactagcccacctcttagaacccctcatttcctttaagacatttgccctgcatttcactccatcattgactaccttcccctttttcttccgactctcctcccagccccctttcttgtttgcttatacccaaccctatgaatagcaatgaaaggtttcttgtaaacagtatgcactttctcatacaccataaaaattgaacctcccccactacccagttgccttatcagtccccattacaacctttaatggctgctgccctcactagatccctaaaagtctgggtgcaagatacctcttttggtgctccaattttgcctcacaacggtctcttcttcctctgtggctcctccgcctacatgtgtctacctattaattggacaggcacatgtacgttagttttccttatcccaaaaaaatcaatttgcaaacaggaccgaacaactttctgttcctctcatgacatcaacacttcaccacaattttcttttatttttctgattaatatgagaagacaggagtaggcctcggcttacttactgctgaaaaaggaggactctgcatatttccaaatgaagaatgttgtttttacctaaatcaatctggcctggtatatgacaacatacaaaaactcaaggatagagcccaaaacttgccaacgaggcaaataattatgctgaacccccttgggcactctctaattggatgtcctggctcctcctaattcttagtcacttaatacctgtttttctccttctcttattctgaccttgtgtcttccatttagtttctcaattcatacaaaaccacatccaggccattaccaatcattctatatgataaatgctccttctgacaaccccacaatatcaccccttaccacaaaatctttcttcagtttaatctctcccactctaggtttccacactgcccctaatcctgcttgaagcagccctgagaaacattgcccatcatctctccatacgacctccaaacatttttgccaccccaacacttcaccactattttgttttgttttttcttattaatataagaagacaggaacgtcagacctctgagcccaagcttgcttgtatacatctagatggcctgaggcaactgaagtatagccagattttagggaatcagagagactgatgaggttcaggaggatatttattaattactttggttcatcagcccagacggattaacatccaaaggactgagccctcaacaaagagttaagttagcttttaggcattttgtgggtggggggagatctgtgcaggaggaatcatactacagaagtgagaaacaaagacagttattttgttgagacatgcattacatcatttcttacttttcaaggaaaaccatgttttgcgacttgagtttatctgtctagtgaccttgcagcttcacagctatggaatcagggtcttcacaatgcctgggaagtgaggaaagataaagctcactagcgatggaaaaacaggcagttagtttttttttttttttttttttatgttctgatcttatttatttatttatttatttattgttgtgggtacatagtagtatatatatttatggggtccatgagatgttttgatacaggcatgcaatgagtaataatcacattatggagaatggggtatccaccccctcaagcatttatcctttgtgttataaacaatccagttacacacttttagttattttaaaaatgtacaattaagttattattgactatagtcaccctgttgtgctataaaatagtatgttttatacattctttctagctatttttttctgtacccattaaccattcccacctccctcccacccccactacccttccctgcctctgataaccatttttctactctctatgtccatcatacattctgattttaaaacggttttcctacatttcatacataagtcactcaagtacacagaattattattttttttttaaatttatttttttattgataattcttgggtgtttctcacagaggggtatttggcagggtcatgggacaatagtggagggaaggtcagcagataaacaagtgaacaaaggtctctggttttcctaggcagaggaccctgcggccttccgcagtgtttgtgtccctgattacttgagattagggattggtgatgactcttaacgagcatgctgccttcaagcatctgtttaacaaagcacatcttgcaccgcccttaatccatttaaccctgagtggacacagcacatgtttcagagagcacagggttgggggtaaggtcacagatcaacaggatcccaaggcagaggaatttttcttagtgtagaacaaaatgaaaagtctcccatgtctacttctttccacacagacacggcaaccatccgatttctcaatcttttccccacctttcccgcctttctattccacaaagccgccattgtcatcctggcccgttctcaatgagctgttgggtacacctcccagacggggtggtggccgggcagaggggctcctcacttcccagtaggggcggccgggcagaggcgcccctcacctcccggacggggcggctggccgggcaggggggctgatccccccccacctccctcccggagggggcggctggccgggcggggggctgacccccccacctccctcccggacggggaggctggccgggcggggggctgacacccccacctccctcccggatggggcggctggccgggcggggggccgacccccccacctccctcccggacggggcggctggccgggcagaggggctcctcacttcccagaaggggcggccgggcagaggcgcccctcacctcccagacggggcggctggccgggtggagggctgaccctcccacctccctcccggatggggcggctggccgggcagaggggctcctcacttcccagtaggggcggccgggcagaggcgcccctcacctccccgacggggcggctggccgggcggagggctgaccccctcacctccctcccagacggggcggctggccaggcggggggctgacccccccacctccctcccggacggggcggctggccaggcggggggctgacccccccacctccctcccggacggggtggctggccgggctgaggggctcctcacttcccagtaggggcggccgggcagaggcgcccctcacctcccggacggggcggctggccgggcggggggctgacccccccccacctccctcccggacggggtggctgccgggcggagacgctcctcacttcccagatggggtggctgccgggcggagaggctcctcacctctcagacggggcagctgccgggcggaggggctcctcacttctcagacggggcggccaggcagagacgctcctcacctcccagatggggtctcggccgggcagaggcgctcctcacatcccagatggggcggcagggcagaggcgctccccacatctcagacgatgggcggccgggcagagacgctcctcacttcctagatgtgatggcggctgggaagaggcgctcctcacttcctagatgggatggcggccgggcggagacgctcctcactttccagactgggcagccaggcagaggggctcctcacatcccagacgatgggcggccaggcagagacactcctcacttcccagacggggtggtggccgggcagaggctgcaatctcggcactttgggaggccaaggcaggcggctgggaggtgtaggttgtagtgagccgagatcacgccactgcactccagcctgggcaccattgagcactgagtgaacgagactccgtctgcaatcccggcacctcgggaggccgaggttggcggatcactcgcggttaggggctggagaccggcccggccaacacagcgaaaccccgtctccaccaaaaccagtcaggcgtggcggcgcgtgcctgcaatcgcaggcattcggcagactgaggcaggagaatcaggcagggaggttgcagtgagccgagatggcagcagtacagtccagcttcggccccgcatgagagggagaccggagggagagggagagggggagggggagggggagggggagggggagggggagggggagggggagggagagctagtttttaaaggactccagctctttctctttctcagggggagttgggttttcttacgtacaactgagtttctgcttacacattctttaatttcttttaattcctgttccagaagaaccacaaaagaagtgaaaatgtccagttcctgccttaattgatgacattccaccactgtgatttgttcctgccccactctgactgatcaattaaccttgtgaccttccttctcctggacaatgagtctcagaagctcccccaccaagcaccttgtaacccccgcccctgcccacaagagaaaaaccccctttgactgtagttttccactacctacccaaattctataaaactgccccacccctatctccctttgctgactctcttttcggactcagcccacttgcacccaagtgaaataaaaagccttgttgctcacacaaagtctgttggtggactgtcttgacatggacgcacatgacaggttccaccatgttttctgtgctcaagcagtctgcccaccttggcctcccaaagtgctgcaattacaggtgtgagccaccatgcctggcttgttcgttctatctatctatctatctatctatctatctatctatctatcatctatctatctatctatctacctatgtatctaaccatctttttagcagagatgtggtctcactatgttgcccagggtctgctcatatatatttcttttttaacattattgttattttgtctcactgtatcacccaagctggagtgcagtggtgggatctcagctcactgcaacctctgcctccctgttctaagcaattctcccacctcagcctcccaagtagctgggactacaggtgcaccccccgccccccagatgatttttgcatttttagtacagacgaggtttctccatgttggccaagctggtctggaactcctgacctcaaatgatccactcatctcggcctcccaatgtagtgggattacaggcatgagccaccatctccatcctggtcatttttttttttttccttgagacagagtcttgttctgtcaccaggctggaattcagtggtgtcatcttggctcactgcaacctctgccccctgggttcaagtgattctcctgcctcagcctcccaagtagctggtattacaggcacatgccaccacacccagctaatttttgtatttttagtagagatggggtatcaccatgttggccaggatggtctcgatctcctgacgtcgtgatccacctgccttggcttcccaaagtgttgggattacaggcgtgagccactgcacctggcctccagtcatatcatttatgtgttgatttttttcagtttgtgtttcagtccagatgcgtagtgatagtaccgggattgagaacaaaaatgttgaaacagatcaatctcaggaacctgtttttttttttggttggttggttgtttttaggggcacaagcgccactgagtgaagtgctcctaatctctgttggttttgaatattgtagaaagcattacagtatttaattttgtgcactaaagattttttctagttctagaatacagataaatctagatgtatgattcttaatcaatcacaagaggctcaataagcctttttcctcattctacttctttcttgaaggggagggccttgatttgcatttgctgcctacagagagcaatttgtccatatttttttctcttctttttcttatcgggagggaaatgagcctgagaaagctgcaggaccatgagttgttagaagattacttccaatgagaggaaaggaagtgtgtgcgacaacacattcagagagaaatctggggaggtagcagagcaggaagcaccagtcatctgtctcccctcctaggcaaaagggaggctggcagaatctgtctgatggagcgatttgggaacactggagtctatgggaggcctgctgctgccagggggaagcctggaagatacactgtgatcaatgccagttcaagttagctttgtttcccaaccccacactttctatgcccccctcaggccagaatcacagtggtggaaaggcttctaaggagaggtatgtgggatggtgctcctacaacaagtcaggatctttaagctaagcctgttttatttctggtctcaagttcaccagaataaaaaaggtattccttgacttagcaatgaatgatatcatggctttagtttattttctgctcacaggtttgagccataaaaaataatttttcttgatatgcaatacatgataactatgtatgtcagaacatgcttctattagtgtactcttgaggatatagtttaaatggcaaataaaattttgcatatatggaagtttctttttatgttactaacagtacaaatatctatcaatacatttacctcttatgtctctactctgaatataaagagcatgataattagatctggatatagatgtttgtaagtagatacaggcaagcataaaattatatgggtttgtctatgtaaatatttatgtatacaaaatatgttcaagagacatcctcctccagccaaaactgatgttgaggcatagacttacattcaaatatatggttgtatagcatctcaggctggaacccagctagctatacaataacattgagggacacagcctgagaagtaagttccagtactgttatgtaaggttttatggaaaacttggaatctgaaggccctgcttttttcttttcactgcatgcctgttatttatatccatcactgggggccttccttgatgcttcttctttcccaaactagctaattggctgattatatttacctgggctgagctaatttggctgattaaaatcacctgagcttagctaattggcttattgaattcacctggtctggatgagcaggcaaggaaaatgaactttgatctactttccttctgaggcttttttacctggcataagcacaaatggactttacctagatacacctatgtgaaccattctgggtgtatatgtttcgctatccacatatcttatatctataaatacatgtacagaactaaatgaagctaggtcagaggtcatttttatttgcattctttccagaccaggtgaatcaagtcagcctaataggctgattgctcagtcgtgatttaccaaatccaagctacatatcacatcacattattcttataaatgtgtaaatgttcttgttatctggcacccgagtgtttttaattcagggtctaatcaaacttgctcagtggaatcctaaccacacagctaggacaagccagaagtgcctgacaccagggactctagcctttctcacaaagatttagcctggagaataagagccaccactaacacttcagcacatgttcgctatcacttggttgaaatatggccagggtccagctttgcatgacaatgaatgactcccttggccttagtgcatttttatttcctagaagaaagaaactagaaacaatgctttcttcatgtatgttaaatgcagcaggttgtatttaagaacaacctcccgtatgtgtgattctggatatagtttataaggcagttaagattatacatgtataaaagtcttttttataccattattagaatcaatacctatcaatatttccactttccacatttttttctgtatgaatatacatacaaagctaaatatgtttgcatatagatatacataggtagaaaggtaaacaaaaacccatacagaattatgtatgtttatgtgaacatttatgtatacaaagcatgttctgaaaagacattttaaatgctctagtatatattaagaacacaaatgtatagtaacttcggtactctgtggcacaataacatctcataatgaaacagagccaagcaatgttgtttgtataagtgtaaacaaagcttcaggttcagggaataagtctagaaagtaagctgacagtacagctatgtaatgctatatttccaggctagcatttcaggctattgctttgtttctcactgtatcaacatgctatttacattcactatgttaggcctgacttgatgaatctgcagtccctatttagacaattgcataattggatccacctgagtcgagctaactagcttattaaagtcacctggactgagctaattggctgactggattcaccagagctgagctcattgactgaatggattcactgtttccaaatagaatgtgtagaaaaatgacttctgatttaattttattttggggctgttttacaaaaaagtgctcacagatcaacattatatagacatatttacataaccctgtgtgtttgtatatgtttatctatctatatatgtcatatttagatcaaaatctacagagaaatgtgtccaataaaactaacattttttttccagtattgaagtaaatgctcaagttacagcccttggcttttattctcttacccaaaaagtcactacttcagcaaagaaaacaaaaatacaaggattgattcctgtgtcacacgtttgaaaaagattctttaaatttatgaaagctttaaagacaattattcagcactttcacatttgggtgagggcctttaagctgaggctattttatttctggtcctatgtttaccagaaagaaaatggtcacccttgacctggcaatgaatgtctttcataaccttagcatatttttattgttcagaagtgagcaacaagaaatgatcctttcttgttaaaagcagaaagatgtatgtgggagcatagttccatttttgtactattttttgaatagtttatggggaagttaagtctatacatatataaaagcatctttttatgtcactatcattaccaatatcaatcaatatttccactttatacatcattattcttatttttttattgagacagggtctcactctgtcaccaaggctggagagcagtggtgccatgtaggttcactgcaacctctgtcccctgagctcaagcaatcctcccacctcagcctcccaagtagctgggactacaagcacataccactacacctggctctttaaaactcgagctcaagcaatccacccacctcaacctcctgaagtgctaaaattacaggtgtgaaccaccgcacctggctatacatcattatgttttataaatatagatacaaagatggatgcatctgaatatagacatacatagataaacatacacacacatataggattatatgactacatatgtgtaaatattaatgtatacacattatgttggccaaaagacattttcaataccctagtatatattatagataaagatgtagaattacttctctactctaacacaatagtattccagaatgaaacatagacatacgatgttgtttgtttaaatgtaaacaaagcttctcctgcatgagaaagatttgggaagatcacagtacacgaactaatagtttatgttcagattagcattttatggccctgcttttattttcaatctatgcatgcactactcccatcaaccattgtaactctgccttgagaaattcactgttgatattttgataattgactgatgggtctaacttctttgagctaactggctgattggaatcacctggcctgagctaattggctgattttattcacctgggctgagctaattggctaattggagaacctgggctgagctaattgaatgattgaaatcaccggggctgacctaatcagctgcatcaattaacctgtcttgagggaaatgagtagtaaaatgacatcttttattttgaggcttctttgcaagacacactcacaaatggaaattacatagacatatttgcataaccctgtgatttctatgtgttaattcatctatgtattttatatctgtatctaaatctacaaaaaaatctatccaaagaaaacttaatttcctttcagtgtagcaggctaactttgagtcatagactccaatttttttttctctaccttaaaaagttacttctttagccaacaaaacaaaaaaatccccaaattatcatgctatgtcatatattcatacaaaagagcccctgaagtttaaagataattatttctggaagtatatttctgggctgagctggttggctgattgtattcacgtgtgttgagaagcaagggtagggtaatgacctctgacatacttttattttttttccaagacatactcataaatggtcattgaataaacatatttatataaccctgcatgttatatatatatatataaaacagaagaaagtgtctagagaaaactaaaattcactgtcagtacagcaatgtatcttcaagtcacagacctcaactattcatttcctaccaaataaagttgcttctccagccaacaaaatgcaatacaataatttatttttttgtcccatgttcaaaaaaaagaattacctcaattggtggaagctttaaataaacattttcagcattcgcacatttgggttagggcttttcagcagaggctaatttaattttggttctgtgttcactagaataaaaagggttatccttgatttggcatgaatgactctcatggccttagtgaatttttatctcccagaagtcagcaacaaggaccaatgcttattttgtataagttaaatgcagatggatggacgttatagcatgcctccatttgtgtactactctagatagagtttattggtcagaacgctttatacatctatggaattatttttatatatcagtatcagtatcaatacctatcaaccctttcaccttctgcatctttactttttatgaataaaaatacaaaaatgaatatatctggatatagatatacacaggtagatgtacatctatgtaaatatttagatagataagtacatctatgtaaatatttaggtgtacactggatgttcacaaaaaggcattttcaataccttagtatataatcaggatgcagatacggacttattaccctactgtatgccacaatacaaacccaggattgtacattgccgtacaatgttgtctacataaacacaaacaaagcttcactttcaaaggtgaggtctttgaagtaagctgacagcatagcaatttaatgctttatgaccagattagcatttcaggaacctgcctaccttctcagtgtaggaatgtgctgtcacgtccactgttttgggcctgacttgatgaatctgcagtcgctatttagataactgtttgattgaatccaagtttgctgaactaattggctgattctttggcctgggccctgcctgcagaagtcattgtgacatatctatggtcccatcagagatgcgactgtcctcttatgcctggaccctgtccacagtgaagatttcaacatatggcttggctcagcacctaagtaataagactctcctattgtgcttgggccctgcctgcaggggttattatgacataaagctgagcccagctcctatgttatgtgactctcttctttttcctgagcccaacctacagggggaatgtttatatatctctgggctagttaaacctatctctctgccagttaaacagttttcttctgttcacgtctaatggaaggctataaatggcattacttagtgaatggaatagctttctaaaagctcaggtgctactgagaagctgaggcttgcaggatttcagcacacttaattctaatcaagtcacaggactcaacctaggaagaagcagttggggaaaagaacctgggcgatgtgactctccatctgggcactcccattagggagtattgtagcatatctttgagcccatcgactgtttgatgtgactctcctgtctcacctgggctttgcccatgggcaagattgtaacatatgtattgggccataacccaggtgttgtgactcttttctcctgcctgacaactgctcccagagtggattgtggcatatggttggcctcaataccaagttggtgttgctcttttgccttggccctgcactcaggagacactgtgccatttcattgggctcagcaccgaggtgatgtgaatctcctgccttgaatctgttcgggggggacattgtgacatatctcagggctcatcaacttacaacatatttgagatgcctcttttatctgatgtgggctttgcccattaaagtaactgtgacatatctctgggcccagcacacaggtcatttaacacttctgcgttggccctgtccacatgttcattgtgatataactctgggcccatgccctaggcaatgtcactctcctcttttgcctgagccctctccttagtggggattgtgacgtattgcttctcccagaacctaggcgatggaacttcctctcatgcccgggccctgcctatgtgagtgattgaatagatagctagacgcagcctctatattatgccactctcttcttcctgagctctacccacaaaggtattgtaacatctctaagcccctctcctaggtgatttgatgcttctttctgaaccctttcctcaggggctgttgtgacctattactaaacacagcacctaggtgatctgacttttctacactgcttgggttctgcccacaatatagattttaatgtatagctcagagcagcacctaggtgatgttactctcctatcctgcctgatccctggatacattgtgtattgtgacatatcactgggtccaacagttaggtgatgtgaccctcctgcatgggccctgacaccaggagtattatgggatatctttgattcatcaccttggtgatgtgaccttcctcttctgcctgggacatgctaaaaacggggattgtgacacatccctgtaccagcacctaggcgatgtgaccgttcttttgcccgggccccatatactttgagtattttaacatattgctgggctcaacatccatgggatagtacactcctgcctgggccttgcccacagggagacttgtgacatatctctgcatgcatcacctagatgttgtgactcttcttttctacctgcaccctgccaacaggaaggattgtgacatatcgctgggcttagcaactaggtaatgtgtctctcctgcatggccttttccacaggggtcattgtgacctatcgctgggcccagcacccaggtaatgtgattctttttgcctgtgtcctgctcacagagtaaattgggacatatcactgtgcccaacacccaggtgatatgactctgctgcttgtgccctgctttcaggagaagattgtgacatatctttggccaagcacccaggtgttgtggcttttttttcctgtctgcaccctgcccacagtgaaaattgtgacatgtcactggaccaacactcaggggatttgatgtcccttctcactctctatgcacaggtggtgttgtgacatatagtttggccaagtttacaggtgtgatgattactctcatactttgaaccagctggtaggagagatactgtcttttgtagcttggcttagcaaaacagtaagagtctgggttatttcgttttacaaaaatcacaggggattatcatgctcttgcctatcacataaagcccttgggtggtacagagtgtcataaaggggccccagcacaaagttgagattgtgtctctcatatgcaaactttgacaacagttaggatggtcatcgtcacaagcggacagaggccactcgtgaggtcctaagtctcatgaaaagatgcagtccacggttagaattgtgacagtcgcatgcaaatatccagatagaattgggatggtgactcatttctaaactaagcttataggttcattgagcaccctcacatctggacccagccaattggagagatgttgatgtgggcttatggccacaggtaagatcatgggcccataccagcctgaaggtatcagagcagatcgtgactctcacacataccataaaaagccctcaactggtacagagagtatcctaacgtgactcagcacacaagtgagatcgtgtctgctgtacacatgcccagatgacagtaaagattgtcatccattaacactaacacagcccattgctgaggtcctgaatctcacacccagaagcagttgaaagttggaaaattgactctcatatgtgaatccggtccacaggtgggttggtgactctcagaccaagactcagcactctcgtgaggttgtgactccgctaaggagacaggctgcgggacggattgaggctttcacgcgtggctccggtccactgttgagactgtgaatcacgtacttagactcaacatacaggaagtgtttcctctcatacctgtaattgagaaatgtgcaggattgttaatctcatccctggcctttcatgcaggtgtgattgtgccctcaaaaggcattgtgaaatattggtgggcccagctcaaaggtgatatgaaatatgcctctccagcatttgagttattttacttttctgtgagagcccagtccacagatgggattgtgacattgctagacccaacaactaggtaatgtgactctattctcctgcattggcattgtccaaagaaggcaaataacacattacttgtcttcgcactcaggtgatgactcttctcctgccttggcactgtgcacagggggcattgtgacatatcactgggctctacacccaggttatgtaacttccatgcctggtccctgagcatagtggccattgtgacatatttcttgctctaaaacccaggggaaattactcttttgccttgctcctacctgcagagggcattgtgacacaactctgtgagtgatgtgacccttccaaaatgggattatggctgagcacagtggctcatgcctgtaatcccagcactttgtgaggctgagtcaggtagatcacctgaggtcaggagctcaagaccagcctggccaaaatggtgaaactctgtctctactgcaaatacaaaaattagctgggtgtggtggcacatgcctgtaatcccagctgcttgggaggctgaggcaggagaatcacttgagcctgggaggcaaaggttgcagtgagctgagatcatgccattgcactctagcctgggtaacaagagtgaaactctgtctcagaaaaacaaaaaacaaaacaaaacaaaaaacaaagtgggattatgacttatgactgatcccagcacctagctgatttgacttttcttttttttccaggttctgcctgcagggaagattgtgacatattgctggaaacaacaccaacataatgttgctcttttgcctgggacctgccctcaaaaggcattgtgatatactggtgggccaagctcgaaggtgatgtgagtatcctgcttcgagccttctcacagagggctttgtgacatatctctgggctaattaactgtttgatgtgactttcttctctgaccttggctttgcccatagggcagagtatgataaacctctgggcccagaacctaggtgatgtgactcttctctcttgcctcaaccacgcccacaagaaggagagtaacatcactgggcccagcacacaggtaatgtgatccttctgcctggtttccccataggagacatactcctggacccatctcctagttgatgttactctccttttctgcctgtgccctgtacacagtgaatattgtgacatatcacttgactgagcacctaaatgtgtgactcttttcatatgcctgggccctgctcactaaagtgatggtgacacatagctgaaaccagcctctaagttatgcaactttccacttctatttgagccctatgctcacggggcattgtgacacacgtttagtttttctacctaggtgatgtgagccttctatctgaactcccccgccaccaaggggtaatgtgacaatttgcttgacccagtactaggtgatgtgactcttccctactgcttggcctcttcccacaggaggaattgtgatgtatcactgggcccagcatgcaggtaatgtgactctcctgcacaggccctgcccacaggggtgattgtggcagattgctgatcccagctcccatgtgatgtgctctcctccactgcttcggctctgcttaaaaagggaatgtgatgtatctcttggtacagcatcgaggtgatgtctctctccttttctgcctgggccctgcatactttgtgtagtgtagcatatggctgagtctaagacctacttggtgtgactctcctgcatgtgtcctgcccacaaggtattgtgacatatattttcattgattacccaagtaatgtgactctcatcttctgtttgggccctgtcagtagacaggattgtgacatgtcactggacccagtatcttgacactgtcactttccttttttgcctgagcctgtcatattttgggcattgtgacttagcactgggcctgacatctgggggatgagaggctgctgcataggccgtgcctacagtgcaccttgtgacatatctctgcattcatcacctaaaacatttgagtcttctttttgtcctgcaccctgctcacaaaaaagactgtgacatattgcggggcccagcaaccagatgatgtgttcttactgcctggaccttgcccatagagagcattgtgacatattgtttggcccagcattcaggtgacatgactctgctgcctgtgacttggttccaagatagaattataacatgccactggccaagaaccaagatgatttgacccttctacctggtccttgccctccggaagattgtaacatagccttggcttattacccaggtgatgtgactctcctgcttgctccctacccacaggtgatattgtgacatatatcttggcctagcttacaaacgggatgatgactctcatattttgaaccagccaatatcagagatattgtctcccatagctaggattagagaaacaatttgggttctgtgctttcttaatgtatgaatgtcataaagcattaaccactctctaacatgccatataaagccttcaggtggtacagagggtgccatcacaaggtgcagtgcacagatgagattgtgtttcttgtatgcacattctgccaactgttaggattatcactctcatacatggaaagaaccaactggtaagattcttaattgctcatgtggatgcaagtcacagttggaattgtgactgtgatatgtgaacatccggcaacaattaggatggtgaatcatttctaaacccacatcataggcaggtaagaactctcctatctggacacagccaattagagacatgttgactttcattcctggacttaaggccacaaatactgtagggaccagccccacagggtcagtgggtctctccctgtgtgtggcgatgagagagtgtagaaataaagacaccagacaaagaaacaagagaaaaggcagctgggcccgggggaccactaccaccgatgcgcggagaccggtagtggccccgaatgtcgggctgcgctgttatttattggatacaaggcagaaggggcagggtaaagaatgtgagtcacctccaatgataggtaaggtcacgtgggtcatgtgtccactggacagggggcccttccctgcctggcagctgaggcagagagggagaggagacaaagagaaagacagcttacgccattatttctgcatatcagggactattagtactttcactaattgactactgctatctggaaggcagagccaggtgtacaggatggaacatgaaggcagactaggagtgtgaccactgaagcacagcatcacagggagatggttaggcctccggataactgcgggtgagcctgactgatgtcaggccctccacaagaggtggaggagcagagtcttctctaaactcccctggggaaagggagaccgccccccccccccaccctttcccagtctgctaagtagcgggtgttgtttcttgacatcttttgctaccgctggatcatgatccgcttggtaacgggcgtcttcccagacgctggcatcaccgctagaccaaggagccctctggtggccctgtccaggcataacagaaggctcgcacacttgtcttctggtcacacctcactatgtcccctcagctcctatctctgtatagcctggtttttcctaggctatgattattgagtgaggattatcataatattggaataaaaagtaattgctaccaactaatgattaatgatactcatatataatcatatctaagatctatatctggtataacaattcttgttttatattttattatactggaacagcccatgtcctctgtctcttgcctcggtgcctgggtggcttgccacccacatctcccccctttttattaactagaatcgccatcgccatcattgcttgtcgttgacttcagacttggtttcggactccttggaggcatctgcagactaaaaggagacaacataagcataccaatattaataatgccagtaacaacaatgatcctctgacaggtttgagccatttgaagggattaaaatcagataattatttagctatgccttgaaaaatgtctgagccaggaacagtggataaatgggcttgtgaagcctcaaagatttgctctttaagttgtgaaatatccaaggttatgttgtcatcccaggcttttaaatgtcttgagaccttttccagctatgttgatcttgattataagcataaggcgttatgcaataatcagaagtattccaatcacactgtaattgcatacggtgttccaaattcataactctatctcccagccaggttacactttggcagagatcattaatctgattagctaatttttgatcaatttgcacctgagaattccaaagtctggaggggtttttctgccatgcttcaacatagtgagcagtttgaacagagttgtggatggcaactccagcagttgctgctgttgcagtaaccgcaattagtcctgcaaggactgcaataagagtaaaaataaatctctttgttcttttaagaatgcctttaagaacttcattgactatgtgaatagagggggaagactcccatggatgacataaagaaactggtatccataccccctccctagcccttatcaagagaatactggtagtgggattaaaagttgcatcaatgcaagtgaacagcttacagttatgacattctgtagtttgtgcatcaggcataataattatatttccaaccaacagcatgtaagagggtttgacacagctcctaataggtatcacccattcagaaataagggtgatgttgaaatgtggatgttttggttttagtacgaaggagttgataggtagtgttccatatccttattcctgacaaaactgcagctaatttccatagttcaggatgttgtggggtaacaaagggatgaatcatttttggcctaggaggagcaatgcctgtgtccatccatttaaatgggtaaggagacaccattgtctcattgtgtaagactgccatccatgctgtatataatctaaggaataaactccgaacataaggtattttttgctggagcaatcttgccaataatgtccttttggagcctaatcaataacaatacccgtggctagagttttgagcacaacagccttgggagcattacaatcatcccataaaattgaagtcactataaaaggtccctttgtaggtttctttggacagtctggcagtccttttgttttattagttttggtagtgagaggaattctccatgcctcatgtggggtacgtttgacagtgagaagttgaaaagagttagtactgaacacattatgtacttgataagaatcatttgtaaaggacggtacggtccacatccaattctggtaagaataagctaaacagccaggcgacttcccaatacgtagtggtggatatttatagccaattgacagattaaagtgcataccttcttcttccggttgagctggaaaccgatcatcattagggatcggcatgaatgcactattattagtgtaaacttctactggggagtccatccaggagacagaccgaattagagggggaaaaggaacatatgcccaataagtataattttgagttgccccgaccggtggtatacttaccgctgcactgactaccataaaggcagccacaattatattaccggtcgtttgggggattctttttctgttaagaatttttctgtttgatgagataacatctttatttgaccccaagtaggtggagttgaacgagaggtgttgtaggtcacacggcgagattttgtctcaatgtggatgtcacgaagggtatgtgtcaggcggtgaaagttgctcttttgtttccgatgggtctttgccttttgtttctgggagcgtttcatctttggagttatggtgcagttttaattgtcgggaggggacccacacaggttgtagtccttttcctggggaaacacaagcaaaacccctaccccaagttatgaccgtgcctaattcccgtgtgttagtttttacgtccttccaccatacccgcattcctttttgtggatcaaatttatttacagtgaaatgttgttctgcggctgtgaaaggttgatttcttgttaagtttaagaaatttagtgtgaaaagagccagatttaatttggcatgaggagtaacagcatctccctttaatttagtatcctgtttacgcagttgatctttgagtgttttcttggctcgttcaaccaaggcctgtcctcgagagttataggggatgcccgttgtgtgagcaattgcccatgtctgaggaagctttttaaaggcagcactagtgtagccggggccgttatcagtttttagtttctcaggacagcccataaccgagaaacaggaaagcatatgtcgtttaccatgagctgtactttctcccgtttgacaagtggcccaaataaaatgagaaaaggtatcaatagttacatgtataaaagaaagcttgccaaaaggaggataatgagtcacatccatttgccgaagagcattctgtgaaagtcctgtagggttaactcctgaagacagtggctgtaaaattaacacttgacaagtaggacagtgacgcacaataattttagcttgtttccatgtaagggggaacttgtttcggagtcccgcagcattgacatgagttaaagcatgaaaattttctgcatctgtaaaaatgggagtaactagtgtatcagctctggcatttgctgccgagaggggtccggggaggggtgtgtgggcccgaatgtgagtaatgtagaaaggagaagaccttgctctgagcacagactgaaacttttgaaaaagaaaggttatcatcaggcataaattggattaaggcagtttcaatgttgtgagcaacatgtactacatacgctgagtcggagacaatgttaactggttcaggaaattcttcaaggacagccctaacagcaagcagctcagctcgttgtgctgaaatagcccctgtgttaagaacacgttctctgggtcctgtatatgctgctcggccgttagaggaagcatcagtgaaaacagtgacagcttcaggtaatggggtgtttctagtaacgttaggtaaaatccaagacgtgagtttaaggaactgaaataattttacattaggacagtgattatcaattatacccgggaaacctgccaaatgcacttgccaagcgatgcaagtagcaaaagcctgttgaacttgtaatcgggtaaggggaacaatgattttttggggctctgttcccgaaagacgaaggagatgagaacgagcctgaccaattaaggtagaaatttgatctagataaatagttagcatacgtaaagagctgtgtgggagaaaacaccattcaattaaattatgtccctgaataatgagtcctgttggtgaatgttcagtaggaaaaattagtatttcaaaaggtaaatgtggattcactctggtaacctgagactgttgaatgcatttttctataagtcgtaattcagaatccgcctcaggagtcaaagaccttttactgcgtaaatccggattgccccgtaatgttgcaaaaagattagacacagcataagtaggaatgcctagggagggacgaatccaattaatatctccaagtaatttttggaaatcatttagagtttttaaagagtctcgtctgagttgaactttttgaggcttaatgaccttatcctctagctgcatccctaaatagtgataaggagatgaagtctgaattttttctggggcgataaccaagccagctgctgtgactgcttgttgtaaagcagaaaaacaagatattaatacagagcgtgaaggtgctgcacaaagaatatcatctgtgtaatgaataatataacattggggaaatttatctctaactggctttaatatgcatcccacataatattgacaaatagtggggctattgagcataccttgaggtaggactttccaatggtaacgtgctgcaggagcaacgttgttaagggttggaacagtgaaagcaaatttttcaaagtcctgaggagccagaggaacggtaaaaaagcaatctttaaggtcaatgatgataagtggccaatactcaggaatcatagtgggggagggcaaaccgggttgtaatgtccccataggctgaaggacagcatttaccgccctaagatcagtaagcattctccacttaccagatttcttttggataacaaaaacaggtgaattccaaggagaaaaagaaggttcaatgtgtcccaattttaactgtgcaagaaccaaaatatgaagtgcctccagcttattttttgggagtggccactgatctacccagacaggtttttgagttttccaggtcaaagggatgggttctggaggcttgatagtgactgcttctaaaaagaataaccaagtcctgtagagtctgctttaggagtaggtatgataggctcagtgatgccttgtgctgattttcctaaacccagaccttgaacaaatcccattttggtcatcatatctttactctgctggctgtaattgcctttaggaaaagtaatctgagccccccattgataaaaaagatctcttcctcacagattgacaggaatgggtgtaatgagggggcgaatagttccaatctgtccttcagggcctgtgcaatgtaaaattatggagctttcatatacctgtgaagcctgaccaacacccactaatgctgtggaggcatgctcctttggccagtgtcggggccattgatgtaaagcgataatggaaacatcagcgcccgtgtcaatcattccctcaaacttctttccctgaatatgcatggagcacacaggacgagtgtcagaaattttgctggcccagtaggctgctttaccttgataatctgtgctaccagaacctccctttcttgtactagaactagatcccaaaggaatgtaaggaagtatcaggagttgagcaatgtggtccccagctgctgcattccaagggactgcagagctaatgacaatacgaatttcacctgaatagtcagaatcaattacaccagtatgtacttgaacaccttttaaatttaaacttgaacgtcccactagcaaaccgacactgccagtcggcaagggaccaaaaacacctgtaggaacagcaataggtggctctccaggcaacaaagaaatatctctggtacaacagagatctactgctgctgagcctgtggtggtgggggacaagcattgtactgagattggtgttggggctgaggcattagatcctgtggcacaaattgctgaagtgggaattggggtggaggttgaatggattgaactgggaaggctcccgtttggctggacgccaggggctgagagttgaggaatgccccactgtttagaggggcctggggccagcccctcatcctgtttccccgatttttaaaaggccgtaaaggattgccatcaatatcaaatctggaatggcattgagatgcccagtgaagaccctttcggcatcgtgagcatacagtagaaggtggggcatcttgttgctgaaaagttttttgttgttgttggtggtgatgtaaaggacagcgacctgcatgccgagggcaatttctttttgcatgtcccttctggccgcatatgaagcattggccagaggattgtccaggcatttgaatagaggccatagcttgtgccataatcattgctgtatggagagttcctcccaccccttcacaggctttaatgtaggaggtgagtatatcaccacccggtggaattttacctttgacggggcgaatagccgcctgacaatctggatttgcttgttcataggccataagttctacagcaagtctttggccatggctatcaggaatagccttttctgctgcgtcttgaagacaagcaataaagtctgggtagggctcatgttgtccctgtctgacggctgtgaaagatgggcatactttaccatcatcttgaattttgtcccaagcatctaagtaacattttcgcagttgttcgataacctcatcatttagtatagtttggtgtcggattgcagcccattgactcattcccagtaactggtcagccgtaacgttaacagggggattagagccctgattaagacgaatgcgttcctggacagcatcaacccaccaagtcctgaattgtaaatattgggatttagataagactgattttgccaaaatttcccaatcatagggtaccaaacgtttatcctctgctagggcttttaatgtggaatggacaaaaggagagttggtgccatattgtttcactgattccttaaaatctttgaggaatttaaaagaaaaactttgccacgtagcaggacgtagctgaacctggcctggatggatggggtcaggctgaattaccacctgaacagcgggaatgcccggtattggctgtgccccaggagccggcaattgcagagcctgattatttacccgagcagcctgattctcaggctgaggggcttgattatcagcctcttgatcttgttgagctgcggggtcagccgcctgctgggcaggatcaacaacaggctgtgggtggttttgtactgctggggtggcaggtactgggggttgtaaaattacaggaaattgccaagcttcaggatccccatattcccttgcctgaactatagccctcataagcggagtgtcatcttcagggatgtatgtaatttgttgcttatgagcggcaatggtagtattggcaacagcagttgcgactggaccaggagcagaaaaagaggtagaattttgaatagaaggagagtcgaaaaactgaaagccagggtgagagcagactacctgctgagcaggtctttcatgggcctgaaaaccaggctgccacggcaagtgtgaaccaggcttcaagggagcctgtgactctacccgagtctgatttgtaggaaaggaaccaggcttcaagggagcctgtgactctaagtgagtgcgatttgtaggaagtggaccaggcttcaagggagcctgtgactgtaactgagtccgattaggaggaaaagaaccaggcttcaagggagcctgtgactctaactgagtccgatttgcagggaatgaaccagccttcaagggagcctgtgactctaagtgagtcagattaggagaaataggattgagggcctcattaccgggccgagaattggaagcctcttttccaagctgttcatatagcagagcctctgtaccgggctgcatagaaacgtaatttgtagactcgtttacaggctgcctggtctcatctgctatttgcacggcggcagtgttgaaagagtgaggagagacaggagggtctggccgcaatggctgttgatatgtttcagctgagttttgctgattgggggagataagtacatttaggtcagttaaaagatcatcataaagcggcaatgggggtgcagtagcctctggcgtaggtggtggtgtcgcaggcatgtcagagtggaagtcctcctttgaaattacgttctcaacttgtgcggtatcctcaggggaaagagagctgagagcttcctcgacctcctcagaggagaggaaagagggatcagtctccatattgtcctcctgagtctgtaaggagtctaagacagagcgaaccgaagcccagattgaccaaatggtgggtgggataaaatgtccccctttatgagcaattttgaattgtttgccaatctcatcccaatctttaagttctaaagttccctcagtcggaaaccaagggcaaagaagatctacaacctcaaatagttcaattaacttttcagtagaaactttaacacctccttctttaagaagagtttttataaaatttaaataagccgaatactttgtactggcctgtcccatggggtccccggaaaactctgagtgttcaagcttaccaccaagtttattgactgcaatcttcaggaatctctcgttgaactcctccgctgatcctgcactcagggtgcaacttcacacagcgagggagagccccacgtcggagagccagatgtagggaccagccccacagggtcagtgggtctctccctgtgtgcggtgatgagagagtgtagaaataaagacacaagacaaagaaacaagagaaaaagcagctgggcccgggggaccactaccaccaatgcgcggagaccagtagtggccccgaatgtcaggctgcgctgttatttattggatacaaggcagaaggggcagggtaaagaatgtgagtcacctccagtgataggtaaggtcacgtgggtcacatgtccactggacagggggcccttccctgcctggcagctgaggcagagagggagaggagacaaagagaaagacagcttatgccattatttctgcatatcagggactattagtactttcactaattgactactgctatctggaaggcagagccaggtgtacaggatggaacatgaaggtggactaggagtgtgaccactgaagcacagcatcacagggagacaggcctctggataaccgcgggtgagccggactgatgtcaggccctccacaagaggtggaggagcagagtcttctctaaactcccctggggaaagggagacccccccccccaccccccaccactttcccggtctgctaagtagcgggtgttgtttcttgacaccttttgctaccgctggaccatgatcagcttggtaacgggcatcttcccagaagctggcgtcaccgctagaccaaggagccctctggtggccctgtccgggcataacagaaggctcgcacacttgtcttctggtcacacctcactatgtcccctcagctcctatctctgtatagcctggtttttcctaggctatgattattgagtgaggattatcataatattggaataaaaagtaattgctaccaactaatgattaatgatactcatatataatcatatctaagatctatatctggtataacaattcttgttttatattttattacactggaacagctcgtgtcctctgtctcttgcctcagtgcctgggtggcttgccacccacaaatacaattatgggtttctaccagcaagaaaatctcagagaaaatagagattctcatgcatattttatgaagccctcacatggtatagagagtatcctataagggcccaacacacaagggaaattgtgacacttgtatgcacaagcagcctacagtattaatagccattctcgtacatgaacaccgctcactgtagaggttctgaatctaaaacccagaggcagtcaaaagttaaaaaattgtcccccatatgtgaatccagtcacaggtattggtgactctcaggccaatattcagcacacctttaagactgtgactttactaaaaagacacagtaagcaggaaggattgaggctttcatgcatggattaagtacatgattgagattgggactcatgtactttgacccaacatacaaagtgttgactctcgtacctggaacaaagacacacgtgagattgtcaatctcatctctaaatcatcctgcaggtgtgattgtaacatacaccttttcccagcacctgagtgattggatcctcctacctcagcctagtccccagaaaaaaattttgacatattgctggactgagcacctagatgatgtgactctattttcttggagctgcacacagtgggtagtttgacatattgctgggctgtgaattcaggtgatgtgagtcacctctccacattccacagggggcattgtgacatatcacttggcctcacatccaggttatatgactcctgcccgcaccctacacacatgagccatttgtgacataatggccagcacccaggtaatgtaactcttttgcctgggccctgtttacataagacttttggtcacatctctgcacccatcaaccatgtgatctgactctcttcttttgccttatttctgctcacaggaaaaattatggcatatcattgggcccagcatcagtgattatgacatatcactgggctcagcccagcctagctgatgtggctcttctctctctctctctctctctttcactctctctcttttagattctgaccacaaaagagattgtgacacattgctgagtccaacatcaagatgatgttatacttttaacttggccctgccctcagaaagcattgtgacatatttctgatgccagcattaagattatgtcagcctcctgcttgctcctttccaaaaggacgcattgtgacatatctctgggctaattaacaatttgatgtgagtcttctctcttactttggtttttctcataggagaaattgtgacatgtctctgaacccagcacctcggtgatgtcactgttctcttttttcttaattatgtccacaaaagaaagagtgacttgtcacagagcccaggacacaggtgatgtgattattcaatctggtccctgcccgaggggtcactgtgacatatcttagggccatcaccaaataatgtggatctcctgttcttcctgggacttatccacagtgaagattgtaacacattgcttgggccagtgtttatatgatatgactttcctcttatcctgctggctagggtaattggaacatttaggtggcccagcctctagtttatgtaaatctcctttttttcctgagcctaacccacaggggggcatttcaatgtatttctgggcttttcacctaggtgatgtgactttgctgcctgggcccttccctcaggagctattgtgacgtattgccagaacaagcacctagctgatgtgtctctccactacagacagtgtcatcacagggccaatcaaaaatatgagattgtgtttctcatatgcatacttaaccaagtgttataattgtcactcttaaacatggaaagaatccactggtgctgtccttaatctcacacgtgggtgtagtccacagttggaatagtgactgtcatatttgactatccagctaaagttgggattgttactcatttctaaacccagatcataggcaggtgaagactctcctatcttgacccagccaatgggaaaggtgttgactcttataactttgcttagtgccacaggttcaaacatgagtccatacgagtaaaaaggtctcagagagaatttgcatctctcatgcttatcatataaagttctcagatgatacagagagtgtcctaacaggacccagcatacaggtgacattgtgccacttttatgcacatccacccaacaggaaagattaaacacagagcccaggcaaaaacctcacacatgaacccagccccctgttgaggtttggaatctcaaatccagacagagtacgaagttagaaaattgactctcatatgtagatgtcatccacaggtgtgttaatgcctgtcagatcaacattcaacacacctgtgagcctgtgtctccactaaaataacacactctgcacaaaaaacctaggctccaatgcgcaactgcacaccaccattgagattttgactcatgtacttagaatcaacatacgggtggtatttactctcatattgaaaaccaggatgtgtccaggagtgttaatctcacctgtgaaccttttttgcaagtgtgattgtgacctatgcctctgcccatcatctatttgagtcttctgcctgggaccagccaacagatgggattgtgacatacggctggagccagcatttaaatgatgtgactccatttttctgccttggtgctgccaattgggcccagaaccaaggtgatgtgagttttctgcctaaaatccacccacagggagcattatgacaaatctttcagcccatcaattgtttgatgtgacttttcttttaccggagctttttctttttttttttttgttatttttaattattataaatacataatggttatacatatttatcgggtacatgtgatattttgatacaggtgtacaacatgtatgatcaaatcatgctcactggggtattcatcacctcaagcatttatcatttctttctattaggaacattccaattcgacttttagttattttaaaatacacaataaattattgttaaacatagtcaccctattgtgctatgaaatactacattttattcattctatttgtgtttttctatccactctttattatcctctctttattatcctttctttcttctttttttaaaattatacattaagttctatggtacatatgcacaacgtgcagatttgttatatagatatacatgtgccatgttggtttgctgcacccatcaactcatcaatcatttacattaggtatttctcctaatgctatcctccctgccagccccccaccccctgacaggtgtgtgatgttccctgtcctgtgtccaagtgttctcattgttcaattcccacctatgagtaagaacatgtggtgttgggttttccgtccttgtgatagtttgctgagaataatggtttccagcttcatccatgtccctgcaaaggacaggaactcatccttttttatggctgcatagtattccatcgtgtatatttgccacattttcttaatccagtccgtcattgatgggcatttgggttggttccaagtctttgctattgtgaatagtgccgcaataaacatgcttgtgcatgtgtctttatagtagcatgatttataatcctttgggaacatacccagtaatggcgttgctgggtcaaatggtaattctagtcctagatccttgaggaattgccacactgtcttccacaatggttgaactaatttacactcccaccaatagtgtaaaagtgttcctatttctccacatcctctccagcatctcttgtttccttccttttttttttttttttttttgagatggagtcatgctctgtcccccaggttggagtgcagtggtgctatctaagctcactgcaagctctgcctcccgggtttacgccattctcctgcctcagcctcctgagtagctgggactacaggtgcccaccaacaagtctggctaattttttgtatttttagtagagacggagtttcaccatgtcagccaggatggtctcgatctcctgacctcgtgatccacctgtctcagcctctcaaagtcctgggattacaggaatgagccactgtgccaggctgtttccttaccttttaatgattgccattctaactggcatgagatggcatctcattgtggttttgatttgcatttctctgatgaccggtgatgatgagtatttttttcatgtgtctgttggctgcataaatgtcttcttttgagaagtgtctgttcatatccttcacccactttttgatggggttgtttgttttcttcttgtaaatttgtttaagtttgtagattctggacattagccctttgtcagatggatagattgcaaaaattttctcccattctgtaggctgcctgttcactctgatgatagtttcctttgctgtgcagaagctctttagtttaattagatttgttgccattgcttttggtgttttagtcatgaagtccttgcccatgcctatgtcctgaatggtattgcctaggttttcttctagggttttcatggttttaggtctaacatttaagtctttaatccatcatgaattaatttttgtataatatgtaaggaagggatccagtctcagctttctacatatggctaggccgttttcccagcatcatttattaaatagggattcctttccccatttcttgtttttgtcaggtttgtcaaagatcagatggttgtagatgtgtagtgttatttctgaggcctctgttctgttccattggtctatatctctgttttggtaccagtaccatgctgttttggttactgtagccttgtagtatagtttgaagtcaggtagcacgatccctccagctttgttctttttgcttaggattttcttggcaatgcgggctcttttctgattccataggaagtttaaagtagttttttccaattctgtgaagaaagtcattggtagcttgatggggatggcattgaatccataaattaccttgggcagtatggccattttcatattgattcttcctatccatgagcatggaatgtaattccatttgtttctgtcctctcttatttccttgagcagtgattcatagttctccttgaagaggtccttcatgtcccttgtgagttggatttctaggtattttattctctttgtagcaattgtgaatgaaagttcacaaatgatttggctctctgtctgttattggtgtagagaaatgcttgtgatttttgcacattgattttgtatcctgagactttgctgaagttgcttatcagcttaaggagatttggggctgagatgatggggttttctaaatatacaatcacgttatctttaaatagggacaatttgacttcctctcttcctaattgaataccttttatttctttctcttgcctgattgccctggccagaacttccaatactgtgttgaataggagtggtgagagaaggcatccttgtgttgtgcaggttttcagagggaatgcttccagtttttgcccattcagtatgatattggctgtgggtttgtcataaatagctcttattattttgagatacgttccatcaatacctagtttattgagagtttttagcatgaagggctgttgaattttgtcaaaggccttttctgcatctatctatcgtggtttttgttattagttctttttatgtaatggtttacgtttattgatttgcgtatgttgaaccagccttgaatcccagggatgaagcagacttgatcatggtggataagctttttgatgtgctgctggattcggtttgccagtattttattgaggatgtttgcatcgacgttcatcagggatattggtctaaaattctattttttttgttgtgtctctcctaggctttggtatcaggatgatgcaggcctcataaaatgagttagggaggattccctctttttctattgattggaatagtttcagaaggaacggtaccagctcctctttgtaactctggtagaattcagctgtgaatccatctggtcctggacttttttttggttggtaagctattaattattgcctcaatttcagagcctgttattgatctattcagagattcaacttcttcctggtttagtcttgggagggtgcgtgtctccaggaatttatcaatttcttctagattttctagtttatttgtgtagaagtgtttacaatattctctgatggtagttcgtatttctgtgggatcggtggtgatacccctttatcattttttatcgcatgtatttgattcttctctcttttcttcattagtcttgctagtggtctatcaattttattgagcttttcagaaaaacagctcctggattcattgattttttgaagtgtttttggtgtctatcttttttcagttctgctctgatcttagttatttctatttcttgccttctgttggcttttgaatttatttgctcttgcttctctagttcttttaattgtgatgttaggttgtgtattctagatctttcctgctttctcttatgggcatttagtgctataaatttccctctacacatagctttaaatgtatcccagagattctggtactttgtgtctttgttctcattagtttcaaagaaaaacgttatttctgccttcatttcattatttacccagtagtcattcaggagcaggttgttcagtttccatgtaagttgtgcagttttgagtttcttaatcctgagttctaatttgattgtactgtggtccaagagacagtttatagtaatttctgctcttttgcattttctgaggagtgctttacttccaattattggccaattttagaatagtgcgatgtggtgctgagaagaatgtaaattttgttgatttggggtagagagttctgtagatgtctattgggtctgcttggtgcagagctgagttcaagtcctggatatccttgttaaccttctgtcacatcgatctaacagtggggtgttaaagtctcccattattatgtgggagtctaagtctctttgtaggtctctaaggacttgctttatgaatctgggttctcctgtactgggtgcatatatatttaggataattagctcttctggttgaattgatccctttaccattatgtaatggccttctttgtctcttttgatctttgttggtttaaagtctgttttatcagagactagaattgcaaccactgctttttgttttgctttccatttgcttggtagatattcctccatccctttatgttgagcctttgtgtgtctattcatgtgagatgggtctcctgagtacagcacactgatagatcttgactctatataatttgcaagtctgtgtcatttaattggggcattttgcccatttacatttaaggttaatattgttatgtgtgaatttgatcctgtcattataatgttagctggttattttgcctgttaattgatgcagtttcttcatagcatcgatggtctttacaatttgacatgtttttgcagtggctggtacaggttgtttttttccatgtttagtgcttccttcaggagctcttgtaaggcaggcccggtggtgacaaaaatctctgtgcatgtgcttgtctgtaaaggattttatttctccttcatttatgaagcttagtttggctggatatgagattctgggttgaaaattcttttctttaagaattttgaatattggcccccactctcttctggcttgtagggtttctgctgagtaatctgctgttagtctgatgggcttccctttgtgggtaatccaacctttttctctggctgcccttaacattttttccttcatttcaaccttgatgaatctgccaattatgtgtcttggagttgctcttcttgaggagtatctttgtggtgttctctgtatttcctgaatgagaatgttggcctgccttgctagattggggaagttctcctggataataccctgaaaagtgttttccaacttggtgccattctcgccatcactctcaggtacaccaatcaaatgtagatttggtcttttcacatagtcttatatttcttggaggctttgtatgtttttttactcttttttctcttaacttgtcttcttactttatttcattaatttgttcttcaatcaataatatcctttcttccgcctgattgaaatggctattgaagcttgtgcatgtgtcatgtagttcttgtgccatggttttcagctccatcaggtcatttaatgtcttctctacactgtttattctagttagccattcatctaaccttctttaaagttttttttagcttccttgcgatgggttaggacatgctcctttagctcggagaagtttgttattaccgaccttctgaagcctacttctgtcaacttgtcaaagtcattctccatccagctttgttccattaatgctgaggagctgcaatcctttgcagaacaagaggtgctctgatttttagaattttcaggttttctgctctggtttctccccatctttgtggttttatctacctttggtctttgatgttggtaacctacaggtgaggttttggtgtgggtgtcctttttgttgatgttgatgctattcctttctgcttgttaattttccttctaacagtcaggtccctcatctgcaggtctgctggagtttgctggaggtccactccagaccctgtttgcctgggtatcaccatcagaggctgcagaacagcaaatattgcagaacagcaaatattgctgcctgatccttcctctggaagcttcatcccagagggcatccatctgtatgaggtgtcagttggcccctactgggaggtgtctcccagttaggctacaagggggtcagggacccacttgaggaggcagtctgtccattctcagggttcaaaacccatgctgggagaaccactgctctcttcagagctgtcagactgagacgtttaagtttgcagaagtttctgctggcttttgttcagctatgccctgcccacagaggtggagtctatagaggcagtaggccttgctgtgctgtggtggactccacccagttcgagcttcctggccactttgtttatgtactcaagcctcagcaatggtggaagcctctccccacaccaggctgtgaccttgcaggtcaatctcagactgctgcactagcagtgagcaaggctctgtgggcgtgggacccattgagctgggcacaggagaaagtctcctgttctgccagttgctaagaccatgggaaaagtgcagtatttgggtaggagtgtcccgtttttccaggtacagcctgttacggcttcccttggctaggaaaggaaaatcccctgaccccttgtgcttcttgggtgaggccatgccccaccctgcttcggctcacccactgtccaaccagtcccaatgagatgaaccagatacctcagttggaaatgcagaaatcacccatcttctgcatcgatcacactgggagctgaagactggacctgtttctattcagccatcttggaatggaatctaccagagctttttctatagaagagattttgatatattttggggcccagcacctatgtgatgtgactctcttctctttctttagccatgaccacagtgggagtccataacaccacaaaagtcacagagtgaattgtaactctcatgcatactgtacaaagcccttgaatagcactgtgtttttacagagatcagcacacaggtgacattgtgacactcatatgcacacccagaatcagtaaaaattgaatctttccatacagacacagctgacagttgagattctgaatctcacatccagaggcagttgaaagtttgaaaattgactctcatacatagactcattccagagatagtttgatgagtttcagaccaagattcagcacacctggaaggctgtgactcccctgaggggacagagtctgcaggagatattgaggctgtcatgtacgtatctatgccacagttcagattgtgactcatgcacttattttcaacctgcagtaggtgttgactcacataccaagaactaggaaatgtatgaaatttataatctcatcccagaaccttccttcaggtgtgattgcaacaaacacctcttccaagcacctgagtaatttaactctcctgcctgagcttagcttgcaaatgaaattgtgacatatcactggattcagtacctaggtgatatgactctattctcctgctttggtgctgcccataggggacattgtgacatatcagtaggcccagatttttttttttttttttgtgattgaacaatgctgcctgtacccttctttctgaaggagattttaatgtaattattgctgagcatccaggtgatgtggctctcctacctggtgcctgccctcaggaaagattgtcatgtacatcttggcacagatcacagatgcaatgatgactctcataccttgaaccagccaataggaaggtattttttctctttaggcttagggaaatgggtaagatcctgggtctcctctttgtatgatggtcataaaggattaccacactttcatttatcttacaaagctctctggtggtatggagagtgccatcacagggcctagtgcacaagtgaaattgtgtttattgtatgcacaccccatcaaccattaagattgtcaccttcacacatagaaagagccaactgatgagtttcttaatcacacagctatgaggcccacagttggaattgtgatcatcatatgagaacattctgccagaggtgagatggtaacccatctctaaacccaggtcataggcaagtgaggactatttgaactggacccagccaattgaagggatgttgactctgctgcttgggcttagggtcacaagtataatcatggatttatgttagcataaaagtcccagagcaaattgcaactcccacacataccttataaagccctcagtggtacagagactattttaacagggtacagcacacaggtgtgattgtgaagcttgtatacacatccaactgaagtaaagattgccatcttcttagatgaacaaagcccactgtcgaagttttgagtctcacacctggaggcagtggaaagtttgaaattgactttctgttccacagaagggtgagtgactgtaagatcaagattcagcacacgtgtgagaatgtgactccactacagaaatacagttcacaagagggattgaggctctcacacagattcagtccagtgttgagattgtgactgatgtacttagacacaacacaaagggcatgttggctctgttacctagaactgggacatgtgctggattcttaatttaatctctggaccttcctgcaggagtgacagtgacatgtgtctctttccagcacctgagtgatttgactcttttgcttggggcctgcccaaatatgagtttgtgacatatcactaaaggtagcacctaggtgatgtgactcattctctttacttggtgctggccataagagacattttgacatatcatgggccttgcaacctggtggtacgaatcttctcttctgtctttgttttttttttaaggcggcattgtgacatattgctgccctgcaaaagggttgtgtgacgctcctgcctgtgccctgtccacatagaccattgtaacatattgttgggtctaacactttggtgatgtaactctcctgcctggtccctgcctacagaggacattgtgacatatttctctgcccatcacccggttgatgtgactcacttctcctgcctggtctctgctcacagaggagattgtgacatatacctgggcccaggacctagctaatttgtcttttgtctttttacagctttctgccaacaagaaagatagtgatatataatggggtttaattccaaggtattaataatattgctattttcccttggccctgctctcagatggaattgggacatattgataggccccagaagcaaggcgatgtgagtctcctgcctggagcctgtccacagagggcattgctgcgtatctctgagctcatcaactatttgatatgactctccttttacttgagtttttttaaataaaagagattttgacatatctgtgggcccagcacctaggtgatggaactgtcttctgcctgagtcactcccacagatgagacagtgacttatttcttggaccagcacactagtgatgtaattttcctgcctgatttctgcacacagatttcactgtgacatatctctggccccatcacctatatgatttgacagtcttctttgttctgggacctctccacagtaggcattgtgatatatcacttggcctagcaggtaaggtgactcttctctcattcctgggccttgcccactaaggtaattgtgacatatagctgggctcagcccctaggttatgtgaatctcctctttttcctgagcccctgtcttagtccaatttcacactgctataaagatactacctgagactgataatttataaagaaaagaagtttaactgactcacagttccacatggctggggaggactcaggtaacttacaatcatggaggaaggcaaagagaaagcaaggcacatcttacatggtggcaggagagagagagagaaccagtcagaggggaaaagtcaaacacttttaaaccattagctgtcatgagaactcactcactatccatgagaatggtgtgaaagaaactgacccatgatccaatcacctcacaccaggagctcctcccttgacacgtggggattacaattagaaatgagatttaggtggggacacaatgccaaatcatattattctgcctcttgccccttccaaatctcatgaccttctcacatttttaaaacataaacatgcctccccagcagtcctcaaagtcttaacttatttcagcattaactcaaagtttcatctgagaaaaagcaagtctcttccacctatgagcctgtaaaatcaaaaagcaagttagttactttcaagataaaatgagagtacaggcattgaggaaatgttcctgtttcaaatgggagaaatttgtcaaaacagtggcgacatgttccatggaatctcaaaatccagcagggcagtcattaaatcttaaagcttcaaaatcgtcttctttgactccatgttacacatctatgtaatactgatgaaataagtgggctcccaaggccttgggcagctccactcctgtgactctgcaggttacagctcccgtggctgctttcatggcctggtgttgagtgccagtgctgtttttaagcacacagtgaaagctgttggaggatctatgcaagctgttgatgggtctaccattctgggttctggaggatggtggccctgttctaacagctccactaggcagtgccccagtgcagactctgtgttggggctctaatcctaaatttcctctctgcattgccttagtagtggttcttcataatggctccacccctgcaaaagacttatgtctggacattcaggtgttttaaacatcctctaaaatctaggcaaaagttaccaattctcaacttttgtcttctgggcacccacaggcccaagaccacatggaagccaccaaggcttggggcttgcactctctgaagcaattgtctgagctgcaagttggccccttttagcgatggctggagctggagcagctgagacacagggcaccaattcttaaagctgcacagagcagaagcctgggccccactcatgaaactatttttgactcctagccctccaagcctttgataggagcagctgctgtaaagatatctgaaatgccctggagacatttttcccattgtcctggctattaacatttggctacttgttacttatgcaaatttctgcagccagcttgaatttccctccagaaaatatgctttttaaatttttctttttttttttttcttgagatggagtctcaccctgtcacccaggctggagtgcagtggcacgatctcagctcactgaaacctttgcctccggggttcaagcgattgttgtgtctcagtctcccaagtagctgggattacaagtgtgcaccactacacacagctaaattttgtaattttaatagagacaggattctgccacgttgaccaggctggtctcaaactacttgcctcaagtgatccgcttggcctcccaaaatgctgggattataggcatgaacaaccatgcctggctgggtttttaatttctactgcatggtcaggctgcaaattttccaagattttatgttctactttccttttaaacataagttccaattttagattatctctctcaagttcaaacttccacagatctctagggaaggggcaaaatgctgccagtctcttagctaaaacatagcaagaatgacctttgcttcagttctcaacaagttcctcatctccatctgagaccacctcagccaggatttcatcatcaatatcactataagcattttggtcaaaaaacattgaaaacctctctaggaatttccaaactttctcacatcttcctgtcttcttgtgagccctccaaacttccaacctctgcctgttacctagttccaaatttgcttccacattttcaggttaactttatagcaggaccccactctgctggtaccaattatctgtattagaccaattttacactgctataaatatactacctgagactgggtaatttataaaggaaaagggtttaattgactcacagtttcacacagctgtggaggcctcagaacacttacaatcatggcagaaggtgaaggggaagcaaggcacgtcttacatggcagaaggagagaaagccagtgaggggagaccttccaaacacttttaagctatcagatctcataaaaactcactcactatcatgagaagagcgtggggggagccaccttcatgatccaatcacctctcatcaggtcccttccttgacacatggggattacatttcaagataagatttgagtaaaggcacagaatcaaaccatatcagcctctcacttaggtgacgtgactctatttttttggcccttaactcagggaatattgggacataagactgtattcagcccctatgtcatgtgactctcttctccttcctggactccacatatatcatgtattgttacatattgctgggttcaacacctaggtgattcaacccagtagtatcttttcattcatcactgatattacgtgactctttccgtcacataatgggtcctcagtcttgccaaataaaggcattgtgatatttcacttaatcctagcacctaggtgatgtaacacttctcttttgtctggacacttgcatatttttggtagtgtaacatatcacttggcccaacacctagaatataggaggtttctgccagggccctgcctacaggggggcctgtgacatatttctcctggctgtggaacccagtacctaagaaatgtacctcttctgcctgcagtttgccaataagaaatgttatgatatattgatgggtccagcaaccatgtgatatatctctcctgctttggcctcatcaacagagagcattgtgacatacccgcgagccaagcacacagatgatgttattctgctgcctgtgccctgctttcaggagtggattgcaatgtaacactggctgagtacccaggttaatgacactgttgcctggtccctgttctcagggaagactgtaatagacccctgacccaatatccaggtaatatgactctcttgctcactcactacccacagttttgtttgtgacatatatcttggccaagttcacaggtgtaatgatgactctcatacttcaaaccagtaaatagaagagatactgtctcttgttattaggtattggcaaatgagtagaatgctaggtctcctctgcacaaatgttatagaggtattccactcttttaaatatggaataaagctcctcagtggcacagagtgtttcagcacccaggtgagattgtgttttctgcatgcacacttttcaaccactttgaatgtcaccttcacacatagacagagcccacttctgaggtcctgaattaatacatgacttgtgtacttatatccaacatactgaaagtgcttactctcatacctagaaccaggacatgtgcagaattgttaatccttttactgaacctccctgtatttttgattgggacatatgcctttgaaaaacattgaagtaatttgactcttgttctttgacccagccttcagatgggattgtttcatatagctgaaccagcacccatgtgactcttttctcctgccttgagctgcacacagggggcattgtgacataatgctgggtcttgaacacaggttatgtaagaatccttttctattttggtacattttgagatggagtttcattcttgttgcccaggctgcagtgcaatggcacgatctcggctcaccacaacctctgcctcacaagttcaagcaattctcctccctcagcctcctgagtagctgggattagaggcatgtgccactgcacctggctaattttgcatttttagtagaagtgggttttatccatgttggtcaggctggtctccaactcctgacctcaggtgatccgctcaccatggcctcccaaagtgctgggattacaagcgtgagtcaccacacctggccatcttggtattttttacagagggcattgtaacatattgctgggccccacactaagttttctgtgaatcttttgtggcctggcacacttactgtgacatatggctgcgtcaaacatgcaggtgatgtaactattctgcctgagccctctttacagggagcattgtgacatatctctgtgtctgttaccccagtgatgtgactctcctctgcctgattcctgctcacaaacagaattgtgacatttttgctggacccagcctctagcttatgtggctctattctcctgtcttggtgctgcccgtaggggacattgtgacatacttcttggccatgaacccaggttatgtgagcctttctgtgccctgcccatgtggacaattgtgacatattaccgagtcctacacccaggcgatgctactctcctgtctggtccttgcctacagggaacattgtgacatatctctttgccattcatccaggtaatgtgggtcttttggtttttcttgttttccctcacaggggagattgtgacatactgctgggcccagcatttggttatgtgactctatattcctgtctcggagttacccacagagggcaatgtgccacatcactggaccttacatccaggtgatgtgagtctctttttctgccttggcactgccccacaagggttacttgattctcctgcttgtggtctgccctcatgggtcattgtgacatattgcagggtccaacacccaggttatgtgactctcttgcctgggccaggggaacaggggtattgtcacatatctctgtgtctatcactcaggactcttttcctgtctggtgtctgctcacagaggagatttttacctatcaccgagttcagcacttagctgatgtaactcttctctgcttcctaggttctgcccacagggaagattgtggtgaattactgaacgcgatacctagatgaaggtactctttttcctaggccatgccctgtgaagacattgttgcatatttctttgtctagcaccaagctgatgtgagtctctgccttgaccctacacacaggaagcattgcaaaatatctctgtgcccatcaactatttgatgtgacccttatctcttatatgactccttctttaggagatattctaacatattttttgggctagcagtgaggtaatgtgactctcttcttctgcttgtttcatgctcacagaagggagggtgacttattgctgaacccctcacacaatgggcacatcacacaaacagatgtgtcacaatgacccctgtcaacaggggtcatggtgacatatattcaggacagtattctagataatgtgactctcctcttcttcctggtacttgtctgcagtgacgattgtgacatatagattggtacagtacataagtgatgtgagtctcttttcatgagcacagactcaggatgtgagtctgtgctttgcccattgaagagatcatttcatatagctgctccctgaccttgattttgtgactttcctctttttcctgagttctacctgcagtgggcattgtgatatatctctgggacccccacctaggtgaggtagccctcatgcatgggtcatcctttcagtgggcattgtgacacatttctggaccgagtacttaggtgatgttactctcctcaattgcttttatgctgccaatgacagatgatgatgttttgctgggccagacacctcagtaatgtgactcttctctttgggctatgccctgcattcattgcatattgtgacatattgctgggcctaacacctagttgatgtgactctcctgaatgggccttgccatattttcactaatcacctaggtgatgtaacattcctcttctgccacggcctcaccaaaagtgggaattgctatatatgactggactcagcatctaggtgatgtgactccttttttacctgatcataagatatactgggtattgtgatatgtcactgggcccaacacttatgggacagaaggctcctgcctcagccctgcccggagggggccttgtaacattctctacatccataacctaaaaaatgttactctcctattctgcctacaccagccaacagaaaaatttgtgacacattactaggcccaggtgacttgcttctcttgcctgggccttgccaacagaaagcattgtgaaatacagaaaacaccagcacaccggtgatgttactctgtttcctgtgccctgctttcaagaggaaattttaacatatcactggccaagcacccaggtgctgtgtctctcctgcttggtccctatttccaggaaatattgtgacatatttctggctgagcaaacaagtggtatcactcttctgctccctacttatttacagataaaattgtagtatgtattatggcccaggtaacaggtacaataatgaatctcataccttgaacagctaataaaagagatactgtctctcatagccaatcataagaaaaagagtaagaaacttagtcttttctttgtacgagtgtcataaagaattaccactctgtcacattttgtaaaagatagcacagagagaagcattacagggcacagcacaaacatgaggttgtgttttctgtatgtacaactctccaaccattaggattgtcactctcatatatagacagaattcagtggtggtgatttgaattccacacatggaataagtctacagctgaatttgtgactgttatacatgaatatctggccacagttggaagggtgactcatttctaaacccagttcataagcaagtaatggctttcccatctggtcccagccagttagagagatattgactcccatagctgtgcttagtaaaacagatccaatctgtggttcatatcaacatgaaggtctcaaagcagattgagactgtcatacatatcatataaagaccacaggtgatacagagattgtactaacaaggcccagaacacaaatgaaattgtgacattcacatgcacacccagccaacagtaaatatttttatgctctcacataaacactgcccacagttgaggttctgaatcctacatctgaaggcagtcaaatgttagaaaattgacttgtatacatagatctggtccacaggttcattgttgactttcacactatgattcagcacagcagtgagtcagtgactttactatgaagacacagggtacaggaggaatcgaggctgtcttgcagtccactgttgagattgtgattcatgtacaccgactcaacattcaggaggtgttgactcttagacatagaactggaacatgtgtagaattgttaatctcacccctggatctttctgcaactattattgtgacatatgcctctcccagcccctgagtgatttgactctcttgttggggcccagctgacagatgggactgtggcatattactagactcagcacctaggtgaggtgacattattcttctgccttggcactgcctacttggggctttatgacatatgtctgggttcataactaagatgaagatttctcttatcttgccttgtctttgctcacatgtgagatagtaacatattgctggactctgtacctagtggatgtatctttccttcttctgagttctgctcacaggggagattgtagcatatcactgggctcaataccaaagtaatgttactcttgtgacacattgtgacatattgttgggcccagaaccaaggtgatgtgagtctcttgcatggagcctgaccacaggaaccatcatgacatatttctgaaagctcaactctttgatgtgattatattcttatacctgctctttgcccataggagagactataacatacctcttggcccagcacctagttgatgtaactctgctctcctgcctgggccacacctacagaagaaagagtgacttctcactgggccagcacacaggtcatgttattttactgccttgatccttgtccacaataatcattgtacatagttttgggctcttctactagaagacgtgagtctcctcttcttcctgggatctgtccacaggggggattgtgacatatcatttgacccagcacctatatgatgtgaccatcatctgatgccttggcccttctcactgggctgattgtgacatataactgggcacagcttctaggttatgtgactcttctcttcctcctgggtcctacccataggaggcattgtgacatatctctaagcacttaaactaggaaatatgacacttttttctgggctctcccctaagagagtactgtgacgtatttctggacccagcacctaggtgatgttacacttctctcctacctgttacctgttactggcagcaaatccatatgggcatggatctgcagcaaccttaattcttacctcctaagaagaaaaaactcaacttagaggcataaggcagaaggagagactgaggaaagttttagaacaggagtgacaactgtagaacagaaacaaaatgaaggaaagtacacttggaagagggccaagtgggtgactaaaaagggaagtgcacggtttgacatttgacctggggttttctatgttggcatacttctggggtctcacattaattctccccattgcctaactcctgagatcttattgggaagttgctgattaccagttttaggtaatccactaattgtctgcttgagaggagaagagatgctgaagttaacagtgggtccctcttcatccttggggttctggaatgaatcagtcttaccatgtacccctaacttttcatgcccttatcaagaagcaatgtttatttgaatcaggtgggcaaagtgtttcaaaagtcactggaaaactcagttctgggacataataggaataaaaagtatacagtaagtcataagaaactgacagagccagagttcaaattggtgcctgtcctgacaatgtgccagcagacacggaagggttggaggtcatctgagcaggtagggtaagaacaagtataaatctcaggggatatccacaagggagccagtgtctttgctgccatgcaaatgcagtaaaagccatggatgcttaaataacagggagtttgtgtttaagaagtcacatggcacgtgaagtgaaagcaaagaggcagatgtgccccggaagcagatagtccagcaggtgagtaaggccatttctgaacacacacagggaacacaggagaatagacagtgcaggttttggggaaagagacaattttagtaggaaccctaagacatttcatggtgttcagctttagccctattactcttgagagtctcctgtccaggagggccataagtgcatcagttctactcagcatggaccccaaggttcttcccacccctgcaaaccatctgtcagggtgagcagagagatagcccatggaaacagagccacttgtggctgagaggaatcattctgggagctggttagtaagccatagagtgaaagggaaaagaaaatcatatagaggggttagctgcctctagccaatgaaggtgaggcataaaggtctttcaccactaggggacatatctgagtcatgcacaccaaagcatgttagcagcaaaaggtaccaagtcacacagcaccaaaacatgttaccagcagtgaatccgcatgggtacgggtctgtagcaacctcatttcttgcctcttcagaagaaaaaattgactgaggggcttaaggcagaaagagagactgggggaagttttagagcaggagtgaaagtttattaaaaagctttagaacaggaacaaaaggaaggaaagtacacttggaagagggccaagcaggtgacttcaaaggcaagtgagcggtttgactttttgactttgggttttatatgttggcatacttttggggtcttgtgttacttttcccacctcacccaactcctgagatcttattgggaagctgctgatcaccagtttcacgtgctttctatttaggagactgtctttccctggtgccggttgtcaccaattattactttagagagacagttaacaactgcctgaccatcacctaatggctgactgacactcctggtgtgtgtgttgagggcggagtcctctcttgccctgctcatacctcactggctacctactttaacactgcaagcattgtgtaatgttggtaaaggagttagaaagaaattatttaggcagatagtgagggtaaaagagtcctcaccagaatttttcttctaacaaaaagcagcccaagaaattttctttttcaatcatcagcctgaaaaattgagctgcaaaaacagataagcaacctggaagtttttatgggggaatgccagcagttgtgttaatagaaaagggcaacctgggggctgggcatatccaaaatgggggctccatctttccttctttgtgaccatgtatacggtaaagaaatcggcaacatggtacccaccaggcaaagaacccatatgcataataaagaattagggtgtggtggccagctttttgttctctatgcaaatggcacacctggtccaaccaatcttttgcaccctatgtaaatcggacaccacctcctcaagcttatctataaaacctcctgcatttcaccatggaaccagtaaccaatctctgtgggactcctctctactgcagagagctcttctctttctttgcctattaaacttccactcttgacctcagtcttgtgtgtctgcatccttgattttcttggtgtaagacaagaaactctgggtatcacaccagacaataaagctgcttcattgtgactctcctgcatggatatatatatatacacacacggatatatatatatatatatagatatatatatccatatatggatatatatatcgatatatatatctatatatggatatatatatctatatatggatatatatatggatatatatatctatatatggatatatatggatatatatatggatatatatctatatatggatatatatatggatatatatatctatatatggatatatatatggatatatatatctatatatggatatatatatggatatatatatctatatatggatatatatatggatatatatatctatatatggatatatatatggatatatataactatatatggatatatacatctatatatggatatatatattgattatatatagatatatagatatatatatggatatatatatctatatatggatatatatggatatatatatctatatatggatatatatggatatatatatggattatatatagatatatatagatatatatatggattatatatagatatatatagatatatatatctatatatggatatatatgatatatatggacatatatggatatatatatggatggatagatagctagatacagagagagacagtctcattctgccacccaggctggagtgcagcagcacaatcttgtgtcattgctaactctacctcccaggttcaagtgattttaatgccccagcctcctgtgtagctgggattacaggtgtgcaccaccatgcatccatccatctttctttctttctttctttctttctttctttctttctttctttctttctttctttctttctttctttcttctttctttccttttcttctctttctttcttctttctttcttctttctttctttctttttctttcttctttcttctttttttctttcttctttctttctttctttttttgtattttagtagagattgagttttgccatgttttccaggctgatctcaaacttctgattacaaaaaatccacctgcctcagcctcccaaagcattggaattacaggcatgagccatcacagctgtctacaatatacttttacatttatgatttaggtgatgtgttcttctctttctgtcaggtgcgggatggttaaatatcactggacctagcacctagggaatgtgactcttgtcttttgcatcagccccactcgttttgagaactgtaacatatcactgggccaaacacctagaagatgggaagtgtctgcctatgccctgcaaacagggctttagccctaccactctcaagagcctcgtgacatatctctgcattcatcatctaggagatgtgactcctccctgctgcctgcgctctgcctacagggaagaccataacaacatttggcccagcaacacggtgatgtgttttttcccagggccttgctcacagggagcattgtgacatatcactggaaccagcatccagggctgtgactctgtgtcctgctgttagaacaggattgtaacatatcactgaccaagcacccaggtgatgtgactcttctgcctggtgcctgccttcagggaaaattgtgacatatgcctggcctagcaccaaagtgatgtggctctcctgctacctctatgcacaggtgggattgtgacatataccttcattcagctcataggtgaggtgataactctcataccacaaaccaaacagtaggagagatgctgtctgtcaaagctaagcttacagaaatacacaagattcagggacttttctttgtataaacattatagtagattactgctctcttgtatataatataaacttctcaggtggtacagagagtgtcatcacagggcccagcgcacaggtgagaatacattatttgtatgcacgccccaccacccattaggattttcaccctcaaacatggaaagagcctactggtaaggtcttgaatctcacacctggatgcagtctacagttgaaattgtgattgtcataggtgaatatccagctgcagttgagatggtgactcatttctaacttagctctgaggcaggtgaggactgttttatttggaaccagccaattataaagatgttgactctcatatttgagcttagttctacaggtacaatcatgggtccataacatcatgaaggtcatagagcagtttgcaactctcattaatactgtagaaggctcttgggtggtactgagagggtcttagcagagccccgcacacaggtgagattgtgacactcatatgcacacccagccaacaataaaacttttcatctttccacatgaacacagcccactgttgaggtcctgagtctcccttgtgaaaacagtgcaaagttgaaaaattgactcttatatgtggatttggttcacagatgggttggtgatgctcagacaaatattcagcacacctgtgagtctgcgactccagtaatcatccacagtctgcaggagaaattgaggctctcaccaacaaatcaagtgcacaattgagattgcgactcttgtactcagacccaacatacagaatgtgttgactctcaattttaaaaccagaacatgtgtgagattattaatctgatctctaaaccatcctgcaagtgtgattgtgacacaagtctctgttcagtacttgagtgatttgactcctttgcctgggcccagtccaaagatgtaattgtgacatatcactgaaaccagcatataggagatgtgtctccatactcctgccttggtgctgcccacagtgggcactgtgacatatcactgggccttgtatccaagtgatgtaagtctcttctttcttgatactgaccacaggagacactatgacatatccctgggcctcaagctcagcttatgtcattctcctatttgttctctgtccacatgggccattgtgacatactgctgagtttggcatccatgtgatataacacttcagcctcagctttgctcacttggggcattgtgatgtatctctgcacccatcacttagatgattcaactcttttcttctgtctcatctgtgcttaaaacgggcaattgttacctattgctgggtccagcatgtagctgatgtgtctcttctcatcttcctaaggactgcctgcaggggatatggtgacattttactttgcccagcaccaagatgacttgaatctgctgcctttgttctactttcagaagacattgtgacatatcgctgggcctagcaccaaggtgatgtgaatcttctgcctggacctgctcacagagggaattgttacatatttttgacttcatcaactatttgatgtgactctcctctctaacctgggccttgcccataaaaaacattgtggcttatctctgggcccaaaacctaggtgatgtgactgtcttcttagggtcatgcccacagtagagagatgccttattgctaaacccagcacacaggtgaggtgattcttctgtctggtccctgcccacaggggtcatgatgacatctctctaagcccatcacctagattatgtgagttctctttttcttctgttagctatatagaagattgtgacatattgcttggcccagacctcatgtgatgtgaatctcctctcatgccttggtcctgtttttttttggccgttgttgttttgttttgttttttgagatggagtcttgctctgttgcctaagctggagtgcagtggcataatctaggctcactgcaacctctgcctcctgggttcaagttattctcctgcctcagcccctgaatagctaggattaaaggtgagtgccaccacactcagctaatttttgtatttttagtagagatggggtttcaccatgttgattaggctggtattgaactcctgacttcgtgatcaactcgcctctgcctcccaaacttttgggattacaggcatgagccaccatgcccagtcaagatgatgatacatttctaaacccaggttataggcaggtgagggttcttctacctatacacacgtttaaagggatgttgaatctcacacgtggtctcagggccacaggtacaagcatgggtcttcaccagcatgaatatctcagagcatactgcgactctccagtgtaatgtataaagctctcaggtgggacagtgtcctaacaggatccagaacacagaaaagatgttgatgctcctatgcacacccaggtcacagtaaaatatgtcattttcccacataatcatagcccaatgttgagattctgcatctcacacctgaaagaagttgaaagatggaaaattgactctcttatatagatctggtctacaggtaggttggtgacattcagatcaaaattaagtacacttgtgaggctataactcttctaagaagacacagctcacaggagcaactgatgctcctatgaacaaatccagtccgtgattgagattctaactcatgtacttattgtcaggcctctgagcccaagctaagccatcatatcccctgtgacctgcacgtatacatccagatggcctgaagcaaccgaatatccacaaaggaagtgaaaatagccgtaactgatgacattccaccattgtgatttgttcctgccccaccctaactgatacgatatattctccctctgccctgaagaaggtactttgtaatagtctccccccaccttaaaaaggtactttgtaatattctccccacccgtgagaatgtactttgtacacctatcccaaacctataagaactaatgataatcccaccacgctttgctgactccttttttggactcagcccacctgcacccaggtgaaataaacagccttgttgctcacacaaagcctgtttggtggactctcttcacagggatgtgcatgacacttagacccaacatacagcaggtgttgactctaatgactagaaccaggacttatgctagattgttaatctcatccctgaaattttctgcagatgtcattgggacatacacctgtgcccaacagctgagtgatttgtctctcttgcttggtcacagctcacaggggccattgtaaaatactgctgatcctgttatccaggtgatgtgagtcccctcacctgctttggcactgcccacagggaacattatgacatatgactgggacctgcacccaggttatgtgacttttatgtttgtgctctgcccacataagacactgtaacgtattgccagtccaacatccagatgatttaactctcctgcctgagctctgcctacagagagcattgggacatatcccttcacccatctttcaggtgatgggactctatgttcttgcctggtccctgcttacaagggatattttgacatatcactgggcctagcacctagcaggtgtcttttctcttctgccagagttctgcccaaagacgagattgtgacatatgactggttccaacagcatggtgacatgactcttttgtcttgaccctgccctcagaagacattgtgacatattgcttgactcagcatcaaagtaatgtgagtctcctgcctggactcttcccacaggaggcattgtaacatgtctttggatgcaccaatcatttgatgaaactctactctcttatttgggatatgcctattagagagactgtgacatatatctgggctcagcacctagacgatgtgaatcttgttccatgcctgagcactgcatatattgtgtattgtgacacacggctgagccaacacctaggtaatgctgcttttcaggataggttcttccaactgtagtattgtaacatatcttttcatttatcttctaagcgatgtgactcttttttctgtctgggccctgccaaaaaagaagaccatgacatatcactggacccaccacctaggtgatgtgagtcttctcttttacctgggcctctcatattttgagtattgtgacatattgctaggcccaacacctagggtatgggaagctcttgcctaaaccctactcgcagaaaaccttgtgacgtatctcttcatacattacctaggagatgtgactttcttctgcttgcaccctacccataggaaacattgtgacatatagctaggagcagcacccaggtgatgtgactctcctgcctggtctctgtccttagggaatattgagaaatatctctagactcaaacccacatggtgtgactctgctgctcactccctatccaaaggtggaattgtgacatatgtctttactcaggtaacagatgtgatgatcaccctcattcctcaaaccttccaataggagaaatactgtcttttgtaggtaggtactgagagtgtcagcacagggcacagcacagaattgagattgtgttttatatatttacactgtggcagtcattaagatgatcaccctcacacatagactgagcccactggagaggtcctgaatcccaaatgcagatgcaatctacagttgcaattgtgacagaacagtcagcacctgttaggatagtgattcatttcagtaggcaaagacttttctatctggaatccaccaatcgaagagatgttgaccctcatgcctgggcttaaagccacaggtaaaatcatgaatccatactagtatgaaggtttcagaacagattgtgactctcgtgcataccacataaaacccttgtgtggtacagagagtgtcctaacagggctgaggaatcagatgagattataacacctgtatgcacatccagctgatagtaaaaaattgtcatcctcccacatgaacacagccctcttttgaagttcttaatttcataccctgtggcagtggaaagttggaaaactgactatcatccatggatccaatccacaggtgggttgtttaacctcaaacattcagcacacatgtgaggctgtgactccacaaagaggacagagtttgcaggagggattgaggctgtcatgtatggatctactctctcattaagattgtgtgactcctgcttttagagccaacacacaggaggtgttgactctcataaataaaacctagatgggttcaagattgccaatcacatccctggaccttcttaggtgtcattgtgacataagcctctgcccaggaccttagtaatttgactcccttgcttggggtcagacaacagacagaaatatgacacatccatggacccagcacctaggtgatgtgactttattcttttgctgtggctccacccgtagagagcattttcacacatcaaggtgctctgtacacaggttatgtgactcttttgcctgtgtccagacaacgttggccattgtgacatattgcagggtccaacacccaaaggaagtaactcttatgacagggttctatctacagagggcactgttacatatttctgtgctcatcattcagttgatgtgactctcctctcctgcctgggccatgccttcaggagagtgggagatagggagagtgacttattgctaggcccagaacacaggtgatataatacttcttccaggtctccttcttcaagtgttactataatatatcgttagtcccatcacatagaagatatgacacttccgtttttttctgcaacttatgcacagtgtggattgtgaaatatgacttggcttagcacctacatggtgtgattctcttctcatgactaggtcttatccactgcgttggttgtgacataaagctgggcccagtcactaggttatgtgactctcctctttttcctgagccctacccacaagaggcattaagacatatctctgggcccattcaccttggtgatgtgaatctactccctgggacaccccccccaggggtattatgaaatattgctggacccagcaccttgtgatatgactcttctcttttgcctgggcattgcatacatgtgtattgtaatatatcgctatgttaaacacctgggtgatgtgactttcctgcataagctctgtccataggcatatgatgatatctcattttgttcatcacctaggtgatgtgactctactcttttcctgagccctgcaaaaagaagagattgtgacatatcactgaactgagcaccttggtgatgtgactatcctctcttgctcaagtgtcacatattattggtattgtgacatacctctgtgaccaacacctatgggtaggaaaacttccacccagactcagcccaagggaccctcatcacttttttaaaagatatgtgacttgaaaaatgtgactgtcttctgcctataccctgccctcagggaagattgtggcatattactgaactaggcaacctagtgatgtgtctcttctgacaggggtttgcccacatagacaattgtgacatatcactgggctcaggacccaggtgatgtgactctgctgcctgttcccaacgttcaagagaggattgtaacatatccctggccaagaactcaggtgatttgactctcctgccttgtccctgtcctcagagaagattgtgatatatcttcagccccaaacccaggtcatgtgacttccccactcgctccctattcagaggagaaactattacatatatcctgggccagctcacaggtgtgatgacaattctcatacctcaaacaagccaatagaagagatactgtttctcattgctaggcttagaaaaactggtaaaatacctgtgtctctttgtatgaaggtcatagagaactaccacaaacttgtatatggaataaaacccttcagtggtacagagagtgtcatcacatgtcccaaaacaaagaggatattgcgtttcttgtatgcacatccagccagctgttaggattgtcaccctaacacctggatacaacccattggtgaggtcttgtgtctcacatgcagatgcaatctacagtttgattcctgactgtcatatgtaaacacctgtccaaagttgggatgctgactcatttctagacccagctcatagacaagtgaggactctcctgtctgggtccagtcaatttgagaaatattgacttttctacctgggcttagggagcagtacaaaggtctcagggcaaattgtggctctcattcctattctacaatgatcttgggtagtatagagaatgtcctaacagggttcagcacacaggtaagattgtgacagtgatatccacacccagctgacagtaaaaattgacatctttcctcatgaatacagcccactgaatacagcccactgttgaggcattgaatctcataaccaaaggcagtggaaaattgaaacattgtctcttgcttgtagacccaatccacaggtggattggttactctcagatcaaaattcagcacacttatgaggccatcactccagtaagaaaacagaatttgcagaacaaattgaggcttccatgcacaaattcagcccactactgagactgtgactcatttacttagacccaacatataggaagtgttgactcttatacctagaattgggacatgtgtaagattgttcatcttttccttagactttcctgcaggagtgatgctgacatgttcctctatttggcatctgagtgatatgacccttgccatggtctagcccacagatggaattgtgatgtgttgctctacccagcacctaggtgatgtgactccatttttctgccttgacactgtccataaaaggtattttgacatatctctgggatatgtacccaggttacatgactctcctgcctgtgtcctgtccacaaattatgaaatattactgggtccaacacccagggatgtaactctcatgcctaggccctgccaacagggggcattatgacaaatctgtgtgccaataacccaggtaatgtgactctctttttttgcatggtccctgctcacagggggcattatgacatattgctgaactcagcatctaactgatgtgattctcctttctactttttgcccacagtggagattgtgacatatcactgggcctcaaactaatgtgatgttacactttcatttttgaactgaactcagaaggcactgtgacatattcctgggaacagcaccaaggttatgtgagtcttctgcttgcactttgcccacaaaaggcgttgtaacatatctttagacctgtcaactatttgatgtgacttatttttttaaagtgaaagcaagtttattgagaagtaaataaacaaaagaatatctactccatagatagagaggccctgagggctgctcattggctctttttatggttatttcttgattacatactaaacaagggatggattatttgtgagttttccaggaaagggatgggcagcttccagaaatcagggtgcctcccctttttacaccatataggatacctgcttaacattgccatgacatttgtaaagtgtcatggtgctgttgggagtgtcttttagcatactaatgcattacctttagcatataatgagtagtgaggactaccagaggtcactttcattgcaatttttcttttggtgtttttttgctgtcttttgtactgcatcctctttcatcagaaagatctttctgaatggtaccttgtgctgacctcttgtcttatcctgtgacatagaaagtgtgatgttctggaagtcaggaattgtgttaattcctttctttttgaggtctcaggataacttgggactgttgggcctgtcagaaagtgacattccttacttaccacatgtcaggaaccctgcacagggactttgtagacaatgtagaaggccaattttcccaaggccaattttagagcttttactggctctaaaaatcaagtatgatttctcgaagaaaagaccattattccagtcaaagccttggtaaaataacctgtgtctcccattgtgtcctgttgcaaatgaaaacatgcttattgcacttaagcaaataactatattgccataaattaagaatactcaccaatatctttgcacattctggagaaatcagggagagagaaacaaatatattccaaattatgtttacaggagtctattttcctccatcgttaaaagctgtaaatagctcaaaagtgctcttgactctgaaaaacaaaggatccacaacattttaagcaaaaagccaaaaaatattacttccatcttttattagtacagttcatgcagtaaactcttgttctccttgatatttattagctttccatgagagtcttgaaagtttttctcctgttctaattttgcagtcttcaaagttatcagaaatttacatttaaaagcacccatcaatgttccatagcatactataggtcatcttttgaaaaggattaaaacaggacaacaattgtctgtgggtgataaaaaagccttagaacagccattattaaaaccacaattgacggccgggtacaatggctcatgcctgtaatcccagtattttgggaggtcgaggcaggtggattacctgaggtcaggagttcaagaccagcctgaccaacatggaaaaaccctgtctctactaaaaatacaaaattaaccaggcatgatggtgcatgcctgtaatcccagctactcaggaggctgaggcaggagaattgcttgaacccggaaggcagaggtttcagtgagctgagatcgtgccattgaactccagcctgggcaacaagagtgaaactccatctcaaacaaaacaaaacaaaacaacacaaacaaaaaccacaattgactagaaatattggttactcttgtggaataaaaaattttacataacaattataactattagtaacatactatacactaagtcatatgagacttacaggagtattccataattttagaacactcaccaatgacttatttgtacaaatacaaccccaagaaagccaaataccatttcatgtttgacaatatattctatataacttttataccaaataaattgaatatgtcatttttggactttaggtgacctaatatctaaaagattaattaggtcagaaaagacaaaatttataatttaattttggaaagtttttcaaatagcaaaggtttaaaacattttacattataaaatcaaatcccaggtcaccctatgtcattcatttagccaaaatggtaacttttctttttaaaaaaatttttaaaagccagaaacctttacttattaacagaagaaagacttagctttccaaacaatctgtctcttgtctttttgctgtagtttattcaaaagacaaaccaaaatctttcattttttacatatcacatgaatatcttgttcaagagtgaaagtctatatttcacctttgtgttagtatactaatgatgccaaacccatttcttaataaaaccttatatacaaacatatgaaatcttaattagtttgactataaggtaagattctcagaaatcttttaaaaccctttaaaatgtttgttgaagagcaaatctgtgctctaagaaaaacctgctgtgctcttattctaatgttcaatttatggaaaaactgagtaacatctatttaactttagccagtatgttcacacacagaattttttatgagattaattttttagaaagcttccagaacttgttcaaaccttcaggtttattctaattttaaacaaacctttagatctctgacttaggaaccaaaattaacattcttatgcctttttttaaatcttaagctgaaagcacattctacttttcttacacaccttgcatgtaaagctgtttttatttcccaaagattacttatgtcacatgaactaaaaggcattcacacatgcacacagtgcactgatgaggtcttcaacctcatgggtggatgcagttcagttggaattgtgactgtcatatgtgaacatccagccacaattgggatggtgactcatctctaaacccagctcatagacagttgagaaatctatctgaaccaaatctactgaagagatgttgactctcatgaatgagcttagggtcacaggtacaatcaagggtgcatgctagcatgaaggtctcagagcagattttgactttcatgcgtaccatacaaatactttgaatggtagagatggtgtgcccacgaggcccagcacacaggtaacattgtgatactcctatgcacaggtagtcaatagtaaagactgtcatttttccacatgaatacagcccactgttgaggtcctgaatctcccacccagaggcagtggaaagttggagaattaactctcatgcgtggatctgatacataggtgagttggtgactctcaaagactccccacggctgtcaggctgtgacttcactaagggaacacaggtttcaggagagatttagtctcttgtgtacaaattcagtcccttgttgagactgtgactcatgtgcttagaccaaacctacaggtgttgactctcatacctggaactggaacatgtgtgggattaatcttatccctggaccttcctataggtgtgaatctgatgtatgcctctgtccagaatctgagtgatttgactctcctgcctgggtccagccttcagcagagatcatgacatatcacgtggtgcagcacttagctgatgtaacctattctcttgccttggctctgcccatagaaggcattgtgatgtattgccaggcccttcacccaggttatgtgatttctgcctgtgccctaaccacattggctatattgacatattgcactgtccgatacccaggtgatgttacttttctgcctgggcccttcctacaggggacattataaaatatctctgtgcccatcacctatgtgttttgactttcttctcctgcatggtttctgatcacaggaggaaatgggacatatccctgggctcagcacccagttgatgtgactcttccttttttttctatgttctgctaacacaaaagatactgacatattgatgggcccaacaccaaggtgatactactctttcactttggccctaccctcagaaggcatggcaacatattgctgggcccaaagcaaaagagatttgagtcctttgcctggaccctccttgcagggggcattgtgatatatctctgggtccattgactgtttgatctgagtctcctctctttcctgggctttgcctatagtagacactatgatgtatctctgggctgtgcacccagctaatttgacttgcctcttctgtctgggccatgactacagataagagtgatttatcaggacccagcacacaagtgatgtggttcttctgcctgctttctgcccacaggcatcattgatacatacctgtggtcccaaaaatgcagataatgtgactcttttttagggcgggaagggatatgtccacagtggggattttgacatattgcttggcacagcatttatgttacttgactctcctctcatgcttaggctctacccactggggtaattgtgacatatatctgggtgcagcccctaggttttatggctatcctcttttccatgatccctactcatagcatacattgtgacatatctctggttttctcacctagtttatgtgactttcttgtctatgcccttccatcacagggtattgtgacatattgctaggcccattatctagatgatgtgactctctttgcttgcctgtgcaccacccaaaagggacattgtgacacatctctgaaccaatttcctacataatatgcctcttcattgctgcctgagaaatgcccccaaagaggattgtgacatgtctctgggcccagaacctgaatgttgtgactctcctgccttgacatagaggaaatattatgatatgtcactcggccctgcacacaaatgatgttactctcctgcctgggccttgcttatagaggggattgagacattttacaggtgaagaattcaagtgacatcattctcatttctcagcctttcctgcaggtaagattgtgacatattacttagcccagcacacagatgaaatttttccgcttgtatgcaaacccagccaacaggggctattgtcaccataacacatgaataaagaccactgttgaggtcctgaatcttatatgtgaacacatcaacagttggaatcgtgactgtcatatgtatatcttgccgtaagtgggatggtgactcatttctggactcagctcacaggaatagtgatgactctgatacctggaccaagccagtaagagagatgttgactctggggtcaacctagacttaggggtctgggtcttttacttgtaggaaggcaacagaagattatgaaacttacacatatggtataaagctcttggggaatacagagtgtcattacagggcccagtccacaggtgagattgtaaccctcctatatacatctggccaacaatttgaattgccaccttcacatatagaccgagcccattgctgaggtcctgaatctcacacataaacctatttcaccattgaaattgttactgtcatatgtggattcagccacaggttggatgatgacaaatttctgaacccaacccacttgcacaatgaacccagccagcagaagatgtgttgattttgaggcttagggcaagaagcaaggttttgtgtttctcacttgtatgaaagtcacagaaaattttcaaactcactcatgttgtataatgccctcaggttgtacggagagtgtcattacataactcagcacaaagtggagattgtgactctcaagcgcacaccaagccaagagtaaaaattgtcatagacacacatagacagaacccactggtgaggtcttgaatctcattctcagatgagtctacagtttgaatttttaatgtcatgtttggatccagccacaggtgggagagtgactcatatctgaacccaactaagaggcacagtcatgattttcatacctggacccagccaatatgagaggtgttgactctcatacctggacttaggaaaagaggtaagatcatgagtttataccagcaccaatgtctcaaaggggattgtgactcttgcccaaacaatgcaaagccctatggaggtaaagagagtgtgataagaggacccagaacacagctgaaattgtgattcttatatgcacttccagcccacagtaaaaagtgtcaccctcccacatgaatagagaccactgatgagcttctgaattgtacatctggatgcagttgaaagctggaattctgattctcgtatgtgcattttgtccagaggtagatgatgactctaggatcagggttcatcacacaggtgaggctttggctctgatatcaggacacagcctgcaggtggaattgggactctcatgcatgaatctagtccatcattgagattgtgactcatgtacttggatgcaactcacaggaggtgttgactcttttacctgaagctgggacacatgtggaattgtgaatcttagccctggaccttcccacaagtgttgtgacatatactttggcctagcacctaagtgattttacttccctgcctggacccagccctcagaggggattgtgacagatacctgggtcaaacacctaggtgatgtgactctcatgcttgagccctatccacagagggtgctgtagaatatcactgggctcagtgcttaggtcatgtgtatcttattttcagccagggccctgcccacagagccattgtgagatatcactgagcccagcacctccgtgatgtgactgtatggcctgggccctgcccacagtaggtattgtgacttacctctgaactcattacctaggtgatgtgactttcctcttttgcctgcattctgccccctcaaaatggcctgtgacataccacaggtcttagcacttaggtgatatgattctcctctgctgcctgggccctagccgtaggagagattgactcattttactgagccgagattgcaggtaatgtaagcttctatcctaggccctgcccacaggaggtatggtgatatatctctgtggccataatttaggtgctgtgactcttctattctcttcaggccatgccagttgagggggattgtgacatatcgttggaccagcacaagggaaattgaaaactcctgcctaggccattcccatagaaggcattgtgacatatcactggtcacagcacacaggtaatttgactctccttcctgggccttgcccataggagatattgtagcatatctttagcccagcacttaaaatatgcgaccctcctagttggtttcttttccacaggtgagaattttacataaaactgcacccagcacacaggtgaaattgtgactcttggatgttcatccagccaacagttatgagtgtcatcatcgcacatggacagagaactctggtgaggtcctgaatcttgtacacggacatagtccacagttggaattttgactgtcatgtgtagatccagccacaggtgtgatgttgacctgtttatggagttagctcacaggcacagtgagaactctcatatcttgacccagtcaatagaagagatgctgactcttatagctaggcttaaggaaattaatagggtcctgggtctcctacctgtatgaaagtcacagaagattatgacactcatgcatattgtataaagccctctggtggtatagagattaattaacagggcccagcacacaggtgagattgtgactttgttatgcagacaccgctgacagtaccatcaccctcacatataaacagagcccactggtgaggtcctaaatttcatgccctgacacagttcacagttgggattgtgactgtgatatttcaatctgatcacaggtgagatggtgactcatttctggatccagcttagaaaatagtgaaggctctttcacctggactcagccaaatggagagacgttgactctgttaactaggcttagggcagcacataaggttctaggtctcctgcttgcataaaggtagcagaggattatgacactatacatattgtacaaagtcccccattggtcctgagagggtcataacagggtctggcacacaggtgagactgtgactctggtatgcacacaggcagagtaaggattatcaacctcctacatggacacagcccactgttgagattctgaatctcacaaccagaagcagtcaaaagttggagttgtgactctcataggtggatgtggtccacagctgagatgatgacctcagaccaggaggcagcacacctggaggctgtgactcctctaccgagatgcagtctgcaggtgtgattgtggctgtcatgcacaaatccagtccacctttgacattgtgacacccttactgagacccagttcacaggaggagttcactctgatacatagagctgggacatgtgtgggattgtaaatcatatcacttaacctttctgcaggtgtgattgtgatatatagctttgcccagcacctgagtaatttaactctcttgtctgagcctggcatacagttaggatcttaacatatacctgggccaagcacctaggtagtgtgacttttttttgggccctgccctcagggataattgttacttatcactaagttcagaacctagtgatgtgacatttctctactgtcttggtcctacccacaaaataaaattatatcactgggcccagcatctaggtaatgtgcctctactctttttcacaggccctgtttacagtgggctttgtgtcacatacatgagccctgctcaaaagcgtgatgatgattctcatacataaacccagctgatagaagcaattttttactcacatagtgaggggtaggacaacaaacaaggtcttgtgtcttttacttgtacaaaggtcacagaacatttttagctcacccatgtgtcatacagtcttaaggtagtagagagagtgctgatacaaggcccacctgaagatgagattgtgactctcctatgcacacctcgctgaccattagaatcaccacattcaaacatggagagagcccactggtgacctaaattttacatgccgatgcagtctgcagttagagttgtaactgtcatatatgcatttggccacaagtaggatggtgattcattattggacccagctcacaggcatgatgatgaatcttgtatctggaatcagcaaaaaaaaaaaaaaagatatattaattcacatagctaggcttagggcaaatggtaaggtcctggttcccctacttgtatgagggtcacagaagattacaaacatgtttataatataaaggccttgggtggcacagagagtgtcacagcaggacccagcacacaggtgagattgtggctctcttaaacacacccagccagcagttaggattgtcaccctcaaacaggaacagagcctactggtgaggtctagaatctaaagtggaaacacggtccacagttggaattatgaatgtcatatgtggatctggccacaagttagatgttgacacatttttgaacccagctcacagtcacagggatgactctcatacctggactcagccaataggagatatgttgactctcaggcttagggcaatgggtaagatcatgagcttatatcagcactatatcttataggaaatttcaattcttatgcatcctgcataaagctctggggtggtatagattgtgtcataacagggctcagcacgagtgggattgagacccttgtgtgcacatgcagccaaaagtaagaactgtcaccctctcacatggacacagcccactgttgaggttctgaatctcacattcaggggtattcaaaagttggaattgtgattctcataggtagatttgattaacaagtaggatggtgacaggtaggatagttaggattgtatcttcaggccaaaatttatcacacctatgaggcagtgactgcccccactgaaacactgtccagagttggtgttggctttctcaggcactgatccagtccatggttaaaaatgtgattcacattcttgaacataactcacaggagtagttgactctcatacctgaagctgggacaagtgtgagattgtaaatcttacgtctggaccttcccgcgggatgatcgttacatatatctttggcagagaactgatgaattttgctctcctgcagaagccctttctatagttgagattttgacatacaccttggtgaagtatctagaatatgtgatgctcctgcctgggctctgccctcaggggggattgtgacatatctccaggacatatatgtaggttatgtgcctctccaatcctgcctaggctgttcccaaaaaaggcattgcgacatgcctgaacccatcacctatgtgatttgactctttttttcccctgggccctgccctcagtggggattgtgacatgtcactgggcccatcatttccatgatgtgacttttgtgttctgctttgaccctgcttgcaggaggattgtgacatataactaggcccagcacctgggtgatgtgactctcatttcctgcctgtgttctgccaacagaatagattgtgacatatagctgggccaagcacccaggtgatgtgactcctgcctacagtggccattgtgacacatcttcttcctgggtcctgtttatgagtgggattgtaacaaatctttggccaagcaccaaagtgatgtgactctcgtttggtttctgctcacaggaggtattgcgacatatatctaggccaagtttagaggcgtaatgatagccctcatacgtggacccagttgatacaggagatttggcctctattttctaggcttagggcaatgggtaaggttctgggtgaagaagcataaggttctgggtgaagaaaggtcacataagattatgacaagcatattctctaaagcccttgtgtgacatttagagattacaggatccagcacccaagtgaaattactactcttgtagacaaacccagctgacaattaggattgtcaccctcacacattgacagagccactggtgaggtcctgaatctcacaggcacagtccacaattggaattgtgactttcgtatgtgtactgggacagttgatatggtgacttatttttggagccagcttacaagcactgtgatgactgtcataaatatatctgaccaataagagagatgttgacacatacctggtaatagaacaatgggtacgatcattggttcacaccagcatgaagatctcaaagcagattgtgactgtcgctcataccacataaagcccttgggtggtacagagagtgtcataacaggacccaggacacaggtgaaattgtgactttcttatgcacactcagccaacagtaaacattgtcaccctcccaaatggaaaccatccactgttgaggctgtgaacctcacatgtgcaggtagccgaaagttggaattgtgactttcgtgaatacatcttgtccacaggtaagatagtgactcaaagaccaggattcagcatgcctgtgaggctgtgactcgtatactgagaaacctgcatttagaattgtggctctcatgcagggatgcagtccactattaagactgtgactcatgtacttagacccaactcacaggaggtcttgactctcatacctggagccagaaaatgcgtgaaagtttaaattttatttctggatcttttgctggtgtatttgcaatatatacctttgtccaatgcctgaaatatttggtcctcctgctggggaaaagcctgcaaatggaattgtgacatatacctgagccctccatgtaagttattttactctactgcataggtcctcaggggagattgtgatatatcactgggcccatcacctaggttaaatgattatcttctttggctgggccctgccaacaccaagagttgtggcatataactggacacatcacttaagtaatgtgactctccttttctgcttgggccctgtacacagggtggattgtgacatattactgtcacaatactgtgtcccgcacacaggaaatgtaacttttctaactgaaccctacccacaagaggcattgtgacatactgttaggcccagttcccaggttatgtgacttcactgccatggccctgcccagagagtggatattgacatctttttggtccagcattcaggtgatttgattatcttgcctattccattctcacaggttaaatttcaaactatgcgtgtttcccagctcacaggcattatgcccatgctcatatagaaaaccagacactaggagtgattttgactctcttagctagattttgagcagtgggtaaagtccgaagtctcctacatttagaagggtaacaaaagttgataaaatgtgtgcatattctataaatactttgagtaatatagacagtataataagggcccagcacatagtgagattgtgactctcataggcataccaagccaacaattaggatcatcacttccaaacatgacagtagcacactagtgaggtcctgaacctcacatgcaggtgcagtccacagttaaaattctgattgtcatatgtggatctgagaacaggttgaatagtgactgatttccagacttagctcagaggcacggacttgcatacccagacctagccataggagatatgttgactctcacaggtagccttaaaacaatgggaaaggtcctgggctttctacttgtatgaaggtcacaaaagattacaaaactcatgcaaattttatgacccccttgtgtggtacagagagtgtcataacagatcccagcacaaagttaaaattgtgattctcataggcatacccagccaacagtgaggattgtcactctcacacatcaacagagaccactgacgaggtcctgcatatggcatgtggatgcagtccacggttcaaattgtattgttcacactcatctgtcactgggtgctgggttcatgatatatgcattttgtaaaaatttataaagctgttattttataatatatgtgctttttatgggtgtaaaattaaaaacataatttttgatttttctatttatctcatgtttcttccacaatcaatttttgtcacatacttttctggaaaatagataatttcatctaaattttcaagtttaatgtcatgacattttaaaaaatattatgtttgaatcttgaatgtatctctaaatatcctcttttgtcttttgtaaaatttttctcctcttgaaatagtttatctactttattattacattcaaagaacagcactaattttactcagatgttattatccctgagtaacaaatgagtcggagaagtcgagaaacttgcccaaggttacacaggtactctgagcctgctcttctaaccactgaacacatggtgtcatccaggaaacacatatgcaatactatttctaaaggtacataaaatcacattatacacatgcaaatatgtgtaaagataaaatgaacctatacagtgtttacctgcagaaaagtcactggttgagggtgtagaaggtcacatggaagaagccttctctgtttttactgttgttttgttgtttttgtagagataaggtcttgctatattgtctaggctgttctcaatctcagctcaagcaatcctcctgcttcagactcccaatgtgctctctgtcatatttttaaaattacttattgggtcaagtgtgctggctcatgcctgtaatcacaacattttgggaggccaaggggaaaagattgcttgagttcaggcatttaagacaagcctgggcaacatagtgagacctcatctcaactaaaaatagaaaaaaatagctgggcacggtggctcacgcctgtaatctcatcactttgggaagctttttcttcaaagattaaaaacaaatcttggtgtctggcagccaggtaaggtgagggcaggaggcagaaacttgcaatccatggggtgcgttggctttttcaacattatttttctccccgactacacagaaaatttcttcagtgtttgatcttatgcatctttgaatccaaacatctcattctttgccttatacatattaaaaatgtattcacagttcataaaacataatcaatctatcaaaaaatattccaaactaaaaacattctttttatagaacctagtaatgcaccttaattccttacaatttgtgttgagaattactagtattatgatgttttctaacatgtatcaagtacttttagatgtttagcacttgagatatattataaaaaccttctcaatattaacctgggactccaaagaatatgtatggcccaaacagttgttttcttcccaacaccaaggaatggcatacaagattgtcttcaagttgaggacaggtcataaagaaaaatttttaaaaagagaaaaaaaaatctgcaaacttgtttctacacatgggtcttacatacatttcttcatcaattatattaattctgaatgaaccatattacctgaagttgtacaaataattgcttcaaattgtagaatccccaggaaacagaaagaagcaaaagcaaacactcccaaagaaagttacatctattccagaccttgatgaaccttgcaaacaattttccattatgtgcaatgactagcaagcaagcaagcaaatatgacaaagttcacaataaataagatcgtgtgaaagacaccagaaaaaaaaaacataacagaaacaaatctgcaaagacatccaatattagaattatcagacacaaaaaatcaaaaacaactatgcttaccatatctaaaaaagacaaatgaacgtatatgcaggaaagaagaaactatataaagattctaaaaataagttgtaaaatgaataatacaataactaaaataaaaactaaccacatttgaacttacatgtacaagacagaaccagtaaactagatgctagatcagtagaaattaacacatatgcaacaaatatcagtgccagaaaaatatctggtaagtattctaagcattcaaaatttaaaactgaaaagcataaggttgatactatttaacctttctaaaaattagaataggtaaaaatactgcacaactcaattcctgagttaacatcaaagcttgacggagacaaaacaaggacaatgatagacaatctcattcataaagacaatttttttttgagactgtgtctcactctgatgccctggctggagtgcagtggcccaatctcgactcactgaaacctctgcctcccaggttcaagcaattctcctgcctcagcctcctgagtagctgggattacaggcacatgccagcatgcctggctaatttttgtatttttagtagagacaaggttttaccatgttggtcaggctggtcttgaactcctgacctcatgatccacctgccttggtcttccaaagtgctgggattacaggtgtgaaccatcgcacccagccaagacaaaaattttttaaaccaattacaaacaaagtgactctttctcggtataaaatgaataaaaccatcaataagtttatctcaagagtacaggataagttgaacattgtataatctacatgtctacataaaataggcacagaataagagcttggtaactagaaataaaagaatattttattttattttctaaatatacaaggtatttcaaataaagtacagcaaatgtacataactactgaaagtttgtcttttaatgtcataaacataataattatgttggtgttcaagatttttattaaacattgcatccatggtttcagccaacaggttaaaatgagaaatcagttacacaattatactggaaaagcagaactagtcaataaactaatagctaaactattggttctacctaggtagattggatccttgcaaagcaactaacacaaaaattgttcatgtatatcgaggatttaaaacttctaggagaggctcggtggggtggctcatacctgtaatcccaccactttgggaggctgaggtggcagatcacgaggtggggagttcgagaacaacctggccaattttatgtagcaagactgaaagttttataagagtaaagagcaatattttttttctccattttatctcctaaagctagcaagaagtatggcacaacgtgtgtgctcaacacacatttatcatttaaatgaataaatacatcccctttgtaaatggtcaagctatgcaaaccaagacttttttagttattattgtttagttgatagaatcaaatctaaggtaataaactgtaaaattcagaaagcactattaaaagtttgatgttacctcatcattcttaggtaaaatagagtaaaaattttagtctctaagtttgtgaccattaaaaaattaaattgccacgtgagaatgaaaaatgaactctcactttaggcgagcataatttgagaggaaaaggcgaaaaagaaaagaaaaactgaaaactcgattgggtcagatatgccagttctactctctctctctatatatattttggaaatagttccctcctctcctgacgcagagggaggctggctgggggatcctgggtccctctgtcctccccgcggtggcagtggctgatctctgctcaggcgtgaggggtgcggccgtgcgctgggcttgagcctgcccggcccagcccctcctcacttccctggactcctcacggtgtctacgggcccctgcacaatcctgagcgtccctctgatggaaggggaggtggcagcagaaagccagtgggagaaactggccccgcaggtcgaggagggctcggccagctgtgggaaatgctctggttgacctcggatttctgcgcactaagctgagccgcgaccccggctttgagccgaggcatccccgggctgggcgaccgtgggcgtgggcgctccggctgctgcggcggttcctgctgtgctcagctgggtcacgactggaactggcgccctccggaagtgaaggaggtgccccgcagaggaggcggtagccgtggtccctgtaaaccaggccttgctgacaaatgtcagacgccaagaacagaagaacggagagcttcagccaaatggaggaactgctggagcggctgagggtgaagctgcccaaactcctcaaagtggagcagcaaagcaaacaccagagaaggacaagaaaaatgaaagtcaaagaaaattagcagaaaccaaaggcagacgctaacgcagtgcaaaacagttcacatcatgatagaaagagttgatgagtctcggaaactaatcttagtgacagaacgaaaggacagcagtgaacatggtaaggtgctgacgattctggtccactggatcccaccatccctaggacagtaaataccatcacagtcaccacacagtgagttacaactgcaccatttcctgtttattcctaaatgaataaaggtgattctcaacacaagtgcaaataaaaagttatttgtttttttttaaactaaagtgtcatgctttagcttttttttttttgagttcttataattttgaaaatgaagttgacatttgtatggcttatgaagtttttgatagtcttgcattagttgaattgttcaaagtaagtatattttaaactaagaagagtcaattgtatttgttttacatattaaaggctcaaagtaacaaataatgtatctgtttatgatttgaaaagttcaaagtttgattatttatccgtacatacacagaatagtgtatcgtgctaaaacatttgttttttaaaagtggcagccatagttcctgcctgcctggatatattttggactttagtatgttaaagacaacgtaaaaaaaaaactttattatgttttagaaaatctaagattggtatacacaaactttacaaattgctgtagggttcagcaaactatgtttataatgtgacattaatacctctacattttgatgtgtaaatctttcttgagaaaagattgttttttaaaaaaatgtctacaaattcaggcttcagttataaaatgacaaaatagtaaagaaatgagtggtttgccgtatgatatgaatacaggcattcaattaaaataccaaatattttaatgaaaagtttttagacaatagacttaaataatttcttgatattttactacagtaataaatattcacaaatattttataaatcatatctattagtactaggttttacttaatagtagtatatatataagatcaaagatctgttaaaaatagatatgtttatcagtaatttggtgtttctaaatacccagaagtcttgttttaatcagattagctctggggatagtttactaattttattttataaacagtgtattcaaagttttctagtttaacctaatattgattgatgatgggtaaacaaatctcttcttgctaatcccataggtttattaaattgttgaagatatttttaatttaaaaattctgtcttcaatgttgtttacagggatttaggtctagtttaacctgctcaacctgttaatcagtgtaggtgccagattccaatttattttcagtgtgtttgtatgacttttctttctttcttttctttctttttttcagacagagtcttgcactgtcatccgggctggaatgcaatggtgcaatcttggttcactgcaacctccgcctcctgggttcacacaattctcctgcctcaaccccctgagtagctggtattacaggtacacaccaccacagccagctaatttttttgtatttttagtagagatggggtttcactatgttggccagactggtctggaactcctgaccttgtgatctaccactgccagcctcccaaagtgctaggattacaggtgtgagccaccgcacctgaccaactttggtctttgaataaaatgtctattaacaaagacaaatttctgcacatttatcaagttgcttgtagtaactcgaaacgtaatatatccaaaattctcctgttattgtctgagaaaacagattctactgttacctaaaaaatcaactggaaggcacttttataaccttgcaccacgtaagaaaaaaactgcaatgcagtagtaataagtgtagatacatcaaatgaaaaatggtaatcgagaatgtcactttcaatgtttgagtatttggactttggttttaaaaaatgtagtaaaatagagcttttggtaagctttctgtagattaacattatcataaattaggaaaaaatcctttaaaatgtaaataaacaaaaaaatacactgaacaacaacaacaacaaaaaactaagatccagcagtgcatacatatttgtccttattttgggagagtatgaaacagaccattgcatgaactttatacagatgttttgccacagtggcatactaataaaaatgatttatctttaatttgaattaacatgtccacatcttaaaaatactgctttgtactaagaataataaatgtaaaagtctttatacacaggaggatcctgatcctcaactaaacatatgtggcaacccattcctctgtttcttccaaactgaagcctgactaaggcttaaatatagagtgagagagactcattaacaggacatgtgaaacaaaaaaaatgagataggatggtcatttctaaggctcagcaattgcctgggggacctcaatataatgatatcaactatgagtcttactgggtaaaaataaacataaaaagctgagaacatcatgactttaatttggtggaatagagtctctggaattatacacagttgtgctaaaagtattgagccagaatgatatgtatctgaggattattaaagggaatatttacaaacacaaaagtatttgttccatatcttgttacagtagcagtactcttgtctgtaatgtcagcttccccaagctacagatgccatagacaaactaagacttagtgtctaatatgttgtttgcagttagtttctaaatttaaaaaacttgcaataattttatgaatttcattaaatgctgtttcatgtataaatctcactaaaaggcactattcagtagatatttccctcagtcttttctgggattttctgctccttgtttccaaaccaaccttatttgaatcctaggcatttctgaagcccaatatgtaataacagaaagaaagcagaaatgaagccaagttaccccaaccagtccatgcctaatatatttggctccccaaatgaaccaaaaaccacacaagctaaacaacagtggatttaaaattcaacctaaattcaacagtagttgtcaaaatcatatgcaaaaattagcaaagtcacaatgtagaaacccttaacctgttattccacaacaaatcatcaaattcttattttggcatttttagaaaaaataaatatattacatatgacaaaatatacccactcacttataataaaatattttgaaatatgcatggttttattcttattcttaaatatatactatattatttagacaagactttcagtaaaaaatacttacagctaccgtgtatgaattaaaacagctatgggaaaataggatttttagttaataatgaagattgaagctccaatgatgtaaagtattgtttcccgggcacacagctaattacccaaatcaagctgaaatatgtttgatttaaaaattttaattttcccactgttgacaatgttgacataacagctaaatcttagtctcagagctggtagtttggaataaatcaagacaagtactattgaggaaggatgggtagtcaagaaagtgactatgtctttgggatgcagcaaacatggccattgtacagtggctgcatattgccaacacaataagccccagcattcgcattgtattccagcttattcaagcaaagctctctccaatagagaaactcccctgtaaacagcatgcacattttgattttacctttcctcaaactgaccttttactcattataatagtaaaaagcacacctgtgggtggagatttaagatgctagtgagatgtgaaaaatgaacaagcatgtacagctactgtgtccgtgcatcaagagggccatccagaacatgcttactaataacaccactttccacctctttataaataattatataagactcccataaaaaagtccctagttccagtctttgctttctcattccataagcaacacaccctgaatcccttctctctcaagatgtactgggtattctgcacctaacctttaaaatagacttactcctttgcaataaattactttatgctgcatcttctttgtgtttgtctcttgtttaaatttttttgaaactaaggcaacaactgaggtttcagaaaagccattcacactatcatgctttgttttgtattttttgttatcaacattttttctcttacatgtcaatattcacattttaaacacagtcaacactgctaaattgaaaatttaaatgaccacaaaataatttatcataaaagcatgtatatctctcatgtttcaccttcaccacactatctattcaactttttaaaaaaatttgatggtcaaatacatatatcaaatttaatattttatttaataatttgaattcaattccaaaatgatttatatggaagtatattgttatatttacttttgaccaaatttggctttccaagctaaggtaaaactaaagcatgttttcaatgtgttaaggaacttaaccttactagcattgagagacattagctagcttgccttaggtagatagcaaggcaagggtttatggagagcccccaacccccaggttagtgccttatccccacatagcagaaaaagcagcttggaaaaaaaaaagctccagacactgttaagggaactagcacagggggttgtgcctggactcatgccctcggatgcacaagtaggagaacctaaagcccatttagataaaaatttgcacacacctctggcttacttagataatggagcaaggcctgacatagaaatgtctgctctttgcatagtcagtgggctcccaggaaaaagttttttctttttgtgggcatgaacacagtgggctttgatgggttctgtggacactttcttttcttttttaactgtgagtctggtatttataaattattactttagcccttgattggtcgtgggccaaggtctttggccaagcttttgcatcagcttctaataggttctgggccaacatgagcagcctttatggatcattacttcagcccctgattggtctcaggccaaggccccaggcaaagctgagtcacacattctctaagacagctcacaaactaagcacaattttttcccattccagtttgtaaaaaccctggatcacagccttatagtggacaacccattcaggcctccctctctgctggagtaggacttttttctttttgcatattaaacttttgttccaaacctcacccttgtgtccacactccttaatcttcttgaatgtagcacaaagaattctgggtattatctcaaacaacagaggttgttacatcttggtgcactgataaaactataacatattttggtgtgttggccagggagaaaggaattcatcagaagggtgattaggagtgagggtcattgtcctcagttactttctgaggcttcttgtcctaagtttttgtctcttagagacaaacctgaaaacattggctctgttctaatccagtttcctttcacgaagggcctacccattgtgtggaacagaaaggaggtcctatggcaactgaaggtttctggttgagtctatacctcagtgttacctaaaagcccttggaccaactccagtccccaacagccaatgaaggtgttggcacaagaacttccagtcttttttttttcatttcattttttttcttcttcttcttttttttggtacctataatttctcctattcattctttgtatgcaatgttgtgaatgtttttacagcctatggatataatcatgctgagtaaagtcagtcagtgtcttagtcatcagatatgtaactcagagttgttgttttataatttcctagcaacagggcgaattcaaaatatctctaaatttttactcagtaagggcctttctctcccacagtaatacagtaataaacattcatggcactgtatgagagaatatttcaccctgagtaaataccctcctttgcatttgatttgtttttttctctccatgtgaaagctcagcactatccaatgaatctaaacagttcctttatgagacaagttcatttttgtttgttctggggcatatgctataggaacagcctatcaaaacccaaacctccttctaacttttgcctaaaaatataaagttggagtttttacctaggatttctaattttacagcacccctagtggaatgggattgttctccataggaagccttgtcaatgctccctccaaaacttacagtcccccaattattttcccttttacatccctttatcactgataaggcctcatgccctatttctaaacagaaaaactcaactttcaacagctggaagaagccatgctgacaaaacaaatcttcaatttttacacatttttaaggcacatgttcttcatcaaactacactggaatttgaacaaaaaggaattttatgttgaaggtaaactcatcccattctctgggattctgatgttttcctggggccatagcaggggaagccaaaaatggtattagggcattccctctataaaagtatcttgcctaaatccaactactgcataatctctccccagccactggagtaccttgagagtcttttgggctgagtggatctagaaaacgagcgggatggaaagctaggtgagaaggtgagcataacgtgtcctgccaacgagctcctctggacccatgggtgaaggtcatgctcgcatccatgggtaacatctatgatggtggctgggaaccagagggaaaaaaggaaggtcgagaagtggtatgccctttttctctttccgccacaccaaaaagagaaaggggactgaggaaagccttgtctcccctttttctagataggtaacaaaccgtctacagtttgcattcccctctagtgcattctgaaacactggaacctctttaaccctgaaactctaaagaaaaaatggcttatattctgtcgcacaaacccatggccatcttagagacaggaggcctggctttctaagggaagtattaatttcaacactacccaacaaatagatctttctttgccctgtgagacaacccagatctttgtaagcattgtaaaattaaatctgccctcttggcagccctacaaaatataattaccaaaagttgagatacaaacccttggggaaccctaaatgcaacttccaggtgcctcaccagcctcccatattttgggcccccaatacccatatatcatcagctcctctggttgtgccactgaagaaacccacataattgctgttgcccctacagaaaatgcccaataaacatggtgttactatgattcaagttcccttctcattgcaggaccttaagaaaataaagtgagccccaggaaagttctctaatgaccctgatacatatatagagtctttccaaaatttaacccaatgtttaatgttacatggagagatgctatgctgcttttaagccaaaccctaactgttaagaaacaagtagccttacaggcagcaaaaaaactcaaaaaaacaaacagtaggttacctagagccagtcagaaaagaaactcagttgaaagggaaaaaagagacagaatccccattcccaatgagaataaaaacaatgacccttaaatattctaattggagtccttgtgatcctatggagaagtggaaaagaaaacacttcctgatgtgcatattagaaagcttgcaaagaaccacaatcaagcatgttaattactctaatctgtccctgttaaatcagaaaccagataaaaatcccctggcctttttgaaaaggctgagaaaaactttagtaaaacaaacctccctgtgttctgatatgacaaaaaaggtttattacttaggcaggctctaatatcagaaggaagttgctaaaacaggccctgttcaaacatatttctaggttttgtcatccttaagttgaaactttgcagtatttaaataacactgttctctgtgccccaactgaagaggtctcaggaaggcactaagactttcctcaatttattagctgaaagggaatatagggcctcaaaatttaaagctcagctctgtcaaactgcagtacagtagataggtctagtcagaagatacaagaacaccggataaagaaagaattaaactcattttcttcttttcctttcccaaactcattggggggaccttacacattactggtttttgcaaactctgggtacctaggaatgttaaaatagccaatcttttataccaccttattaaaaaaactcaagcacctaaaaactcactcgctaacttgggaacctaaaactaaaaagcctttaaccaactaaagcaagccttacataaagcaccaaccctcagtcttcccataaggaaggcatttaatctctatgtatcaaaaaggaagttaatgaccctgggagttttaactaaggcttaaggtccagctcaacaaccagtgggttacctaagcaagaaacttgacttgatggctagaggatggccagcctgcctctgagcagttttggtgatggcttgctggtatcaaaggccacgaggttaacaatgggaaataactatctgcattcccacataggactgctgtcctctaatggaagcctctgactaaaaaccacttcctgaaatatcaaattttgctgctaaggtgatctgcagtctggttaaaaacctgcccttgcctgaactcagccactttctcccagaggaaactaaagagcctaaacaggattgtaaacaggtagttgtgtaaactggtaaaagatataagaagaatcactgcttatattctctgtaaagttttaattaattaaataaacatttttaaagtgtactcaacttaatgaaaagcgaatatccaagctataagtatattcagaaagcctttctatttttatctatataaaacttgttttcctggaagaggattttttctcacttaactaaattacttttatccactctttcttgtcactgttgatgcaagcatagaaggccctaaaataacctctggtggcctgggactcctcaagaaaacaaaaaagccaccataaattgcattttaaaagatctctgctttttttcatgaaacccctagaattaaaagtaataagttcctctccaaatctgtctctttcttctagctatgcttgtttattaggccctggaaactatatgcctagccctgttcttttttttttttttttatgcaggacagagtctcactctgtcacctaggctggagtgcaacagcacaatcgtggctcactgcaacctccacctcctgggttcaagcaattctcctgcctcagcctcccaagtagctgggattacaggcatctgccaccacacccagctaattttttttatttttagtagagatggggtttcaccatgttggccaggctggtctcaaactcctgacctcaggtgatccacccgcctcagcctcccaaagtgctgggattacaggcatgagtcaccatgcctggcccctagccctgttcataaaaggcctcaaccagagaccaataatccaattagaaaactggcaaacaaaaaatcttatagttactgaatcttcttctgtttgtctagatggttatatacgtgttttgtgtgatgtctataaaaaacctctaattaattggtgtacaaataagcacttagataaaatgttaagtcaaaattaaaggctgtagtgcctcttggttcatgcaacttcaatatttaagaaataaaaacattcttgtagaatacaaacatcttaaacatgtaaataggtggtctaaattatgcaggtcaaatattaggtttgctaaatgttttaatgtaaactgcttctttggcccttgagtactgtcaacctgccagcttcacaattagtaaggcctagtgacatattaaagtaaccatgcccctaactatactggaagaagtcagactttatctgctcctagcacataattaaaaccacttaccaggttttacattaaagttaaaattacaaaaagttaccattataacatgtaattgaggctactgaaaatgaatgtgtatgcaacgtgtgtaaaaacagtaaaattttataataaaaaattataagaaggcataaaaatctacatttttcctaggagtaaaagattgtcttaaattaaataaagtgaaagttttaagcaaatttttgaaataccaaaaaattaattttgcaaaagaatactctgtgtaaaaatattaactaaattcaaaggaatatcatatggtgttccttaaaattaagcatttaatgaaagcacaacaaagctttcttaagatgctcatctgtacatatcaaaatttctaaaagattataaaagatttgtaaaaatcggagatccattccaagatggccaaataggaagagctctggtctgcagctccaaatgtgattgaagaagatgatgggtgatttctgcattttcaactgaggtacatggctcatctcactgggactggatggacagtgggttcagcccatggagggtgagccaaagcaggacagggtgtcacctcacctgggaggcacaaggggttgggggatttccctatcctagcctggagaagccaggacagactgtacttggaaaaatgggatattcccacccaaatgctgtgcctttcccaaggtcttagcaaccagtagacaagaagattctctcccgtacctggctcagcaggtcgtgaacccacagagccttgctcactgctagcacagcagtctaagatcagatggcaacgcagcagcctggctaggggaggggcatccaccattgctgaggcttgagtagctaaacgaagtggccgggaagcttgaactgggtggagcccactgcagttcagcaaggcctactgcctctatagactccaactttgtgagcaaggcatagctgaacaaaaggcagcagatagcttctgcagatttatatgttcctgtctgacagctctgaagagagcagtggttcacccagcatggcatttgagctctgagaatggacagactacctcctcaagtcaatccctgacccccatgtagcctaactgggagacacctcccagtagaggccgacagatacctcatataggtgggtgcccctctgggacaaaccttccagaggaaggatcaggcagaaatatttgcagttctgcaataattgccattctgcagcctctgctggtgatacccaggcactcagggtatggagtggacctccagaaaattccaacaaacctgaagctgagagacctgttagaaagaaaaccagcaaacagaaaggaatagaagcaacatcagcaaaaaggatatacaccaaaaccccatctgtatgtcaccaacattaaagaccaaaggtagataaaaccacaaagatggggagaaaccagagtagaaaagctgaaaattctaaaaaccagggcaccttttctcctccaaaggatgacagctcctcaccagcaatggaacaaagctggatggagaatgactttgctgagttgacagaagtaggcttcagaaggtcggtagtaacaaacttctgagctaaaggagcatgttcaaaacaaacacaaggaagctaaagaccttgaaaaaaggttagatgaatggctaactagaataaacagtgaagagaagaccttaaatgacctgatggagctgaaaaccatggcatgagaacacgatgcatgcacaagcttcaatagccaattcagttaagcggaagaaagggtaccagtgattgaagatcaaattaatgaaataaaatgagaagacaagcttagagaaaaagagaaagaagaaatgaacaaagcctccaagaactgtgggactatgtgaaaagaccaaatctacatttgatacgtgtacctgaaagtgatggggagaatggaaccaagtaggaagatgctcttcaggatattagccaggagaacttccccaacctagcaaggcaggccaacattcaaattcaggaaatacagagaatcccacaaagatattcctcgagaagagcaactccaagacacataattgtcagacttaccaaggtaaaaatgaaagaaaaaatgttacgggtagccagaaaggtcaggttacccccaaaaggaagtccatcagactaacagtggctctctcagcagaaatcctacaaaccagaagagagtgggggccaatattcaacattctgaaaggaaagaatgtcaacccagaatttcatgtccagccaaactaaacttcataactgaaggaaaaataaaatcctttacagacatgcaaatgctgacagattttgtcaccaccaggcctgccttacaagagctcctgaaggaagcactaaacaggaaagaaacaactggtaccagccactgcaaaaacatgccaagttgtaaagaccattgatgctaggaagaaaccatcaattatcaggcaattttgttgatcttttcaataaaacagctcctggattaattgattttttgaagggttttttgtgtctctatctctttcatttctgctctgatcttagttatttcttgccttctgctagtttttgaatgtgtttgctcatgcttctctagttcttttaattgtgattgtagcatgtcaattttagatctttcttgctttctcttgtgggcatttagtgctataaatttccctctacacactgcttaaaatgtgtcccagagattctggtatgttgtgtctttgttctcattggtttcaaagaacatctttatttctgccttcatttcattatttacccagtagtcattcaggagcagcttgttcagtttccatgtagttagcagttttgagtgagtttcttaatcctgagttctaatttgattgcactgtggtctgagagatagtttgttgtgatttctgttcttttccatttgctgaggagtgctttacttccaactatgtggtcaattttggaagaagtgtgatgtggtgctgagaagaatctatattctcttgatttggggtagagagttctgtagatgtctattaggtccacttgttgcagaggtgagttcaattcctggatatccttgttaactttctgtctcactgatctgtctaatgttgagactgtggtggtaaagtctcccattattattgtgtgggagtctaagtctctttgtaggtctctaaggacttgctttatgaatctgggtgctcctttattgggtgcatatatgtttaggatcattagcttttcttgttgcattgatccctttaccattatgtaatggccttctttgtctcttttgatctttgttggtttaaagtctgttttatccgagactaggattgcaacccctgctttttttggttttccatttgcttggtagattttcctccatccctttattttgagcctatgtgtgtctctgcaggtgagatgggtttcctgaatacaacacactgatgggtcttgactctttatccaatttgccagtctgtgtcttttaattggagcacttagcccatttacattgaaggttaatattgctttgtgtgaatttgatcctgtcatggtgttagctgttgattttgctcattagttgatgcagtttcttcctaccatcgatggtctttacaatttggcatgtttttgcagtagctggtaccagctgttcctttttatgtttagtgcttccttcaggagctcttgtaaggcaggcctggtggtgacaaaatctctcagcatttgcttatctgtaaaggattttatttctccttcacttatgaagcttagtttggctggatatgaaattcttggttgaaaacccttttctttaagaatgttgaatattggcccccattctcttctggcttgtagtttctgctgagatcagctgttagcctgatgggcttccatttgtgggtaacctgacctttctctctggctgccctcaacattttttcctccatttcaactttgatgaatctgacgattatgtgtcttggagttgctcttcttgaggagtatctttgtggcgttctctgtatttcctgaatttgaatgttggcctgccttgctgggttgggatagttctcctggataatatcctgaagaatgttttccaacttggttccattctccctgtcactttcaggtacaccaatcagacgtagatttggtcttttcacatatttccatatttcttggaggctttgttcatttctttttactcttgtttctctaaacttttcttctcacttcatttcattaatttgatcttcaatcactgataccctttcttccacttgattgaattggctactgaaacttatgcatgtgtcatgtagttcttgtgccaaggttttcagcttcattaggtcatttaaggtcttctctatgctgtttattctagttagccatttgtctaatcttttttcaaggttttcagcttcattgagatgggttcgaacatcctcctttagctcggagaagtttgttattaccaatcgtctgaagccttcttctctcaactcgtcaaagtcattctccatccagctttgtttctttgctggtgaggaactgcattcctttggaggagaagaggcactctgatttttagaattttcagcttttctgctctggtttctccccatctttggggttttatctacctttggtctttgatgatggtgatgtacagatggggttttggtgtggatgtcccttctgtttgttaattttccttctaacagtcaggaccctcagctgcaggtctattgtagtttgctggaggtccactccagaccctgtttgcctgggtatcaccagcggaggctgcagaacagcaaatattgcagaatggcaaatattgctgcctgatccttcctctggaagcttcatctcagaggggcacccggctgtatgaggtgtcagtcggcccctactgggaggtgtctcccagttagactactcggggttcagagacccaattgaggaggcagtctgtccattctcatatctcaaaactctgtgctgggagaaccactactctcttcaaagctgtcagacagggacatttaagtctgcagaagtttctgctcccttttgttcagctatgccctgcccctagaggtggaatctacagaggcaggcaggcctccttgagcagtggtgggctccacccagtttgaggttcccagtcattttggttacctactgaagcctcagcaatggcagaagcccctcccctagccttgctgccaccttgcagttcaatctcagactgctgtgctagcagtgagtaaggctccttgggcatgggaccctgtgagtcaggtactggatataatctcctggtgtgccatttgctaagaccattggaaaagcacaatgttagggtgggagtgtcccgattttccaggtacagtctgtcacagcttcccttggctaggaaagggattaccccaaccccttgcactttccagctgtggtgatgtcccaccctgcttcggctcacactccataggctgcacccactgtccaacaagccccagtgagatgaacccagtacctcagttgaaaatgcagaaatcacccatcatctgtgtcactcacactgggagatgtagactggagctgtccctattcagacatcttgggacttctatcaactagttataaatattcttaacttgtagcaatatagctgtttgcatcagtgaaacaaaaatccattttctatttttgttttcttttgagacatagtctcactctgtctgtggccagcatgcagtggcacaatctcagctcactgcaacctctgcctcccaggttcaagtgattctcctgcctcagcttccagagtagctgggactacaggcatgcaccaccatggccagctaatttttgtatttttagtagagatggagtttcaccatgttggctaggatgatcttgaactcttgacctcgtgatctgcccacctcagcattccaaagtgctgcaattacaggcttgaggcaccatgcccagctgaaaaatccattttcttatgcaatgaaatacaacagaaaaacgctagttcttttaccaaggctctaattgggagggtttgttttcctttaagaaatcaagtttaagttgcaaagccagtaacagcctcttgggaaagctggtctcataccttgtctacacagtcctcatacaaaattcctggactgttgtgagtaaaaaaatgtcactttccaacagacttagaaacactatgctcttggaacctcaaaaatacaggagtttaaccaactcacaggtatttaagggtacaaatccatggcttggcccaactttataaagtcttatctaagatttcttttggaacagatttccatcaaagcctatcaaaaaggcctgtggagagatagttactcttgctgcactatgttcaaatagttaggccaagtataataataaagtctattttgcaaacaattcagtctattgtgagtagcttttttttaaattttattttattttattttattattattatactttaagttttagggtacctgtgcacaatgtgcaggttagttacatatgtatacatgtgccatgctggtgtgctgcacccattaactcatcatttagcattaggtatatctcctaaagctattcctcccccttcccaccaccccataacagcccccggagtgtgatgtttcccttcctgtgtccatgtgttcttattgttcaattcccacctatgagtgagaatatgcagtttggttttttgttcttgtgatagtttactgagaatgatgacttccaatttcatccatgtccttaaagaaggaattttgtgagtagtttctaacaaaaaaaaaactaaaagaaagtaattgtttcaaaacttgtcatacatttctcatgaacttctagtctcattcattgtttcaaacgttttgatgacattttaaacctacccggcttattcctgtaagccaaccagcaatctctgcctgcagctcatcaaaaaaagatagggatgggtaatgtaaaaatctaaatcaatattctagttctaagcaattattctgcaaatctggctgggtgatagaaataaataaggtgccaataacccagagctttcttttatcagaaagtaagatcaagggaactaaccaaagccaagcctcatgcacccaaatcttagcaaatataactatagctaccagttatcagggtgtgtcagcagcctcaacctttttaggtgtttcctgccctccttgtttcatttcaattcatgtcctctactaaaccagattgtttctttttccctaaaaactatcaagctccaagtggtaatgcaaatggaatgatgcataaacacatgtttcttctgagatacttaaaccagccctggaagaaatcttagctgctagaacagtacccctctccagtgaggaatagccaaaaatatcaatgcctattctccctaacagcagttagggtctcccctcctgagaggagactgagagggattagctagttagcctaaggtggacagcaagggaagggtccccagagagcccctaacccacgagtcagtgcctcataaccacttacctaccaagccaggcaaaatggcacacacctgtaatcccagtgactcaggaggctgaggcatgagaattgcttgaacttcggaggctgagattgctgtgaactgagatcacaccattgcactccaccctgggtgacagagactcagtctcatgattaaaaaaaaaaaggaactaatctttcatcaatattttaatagttttatgtctgagcacttaagcatcaaggacaggaccctggatgatgaaaagtgcatatttaaatttataaagtaaaaaatgaccatcagatactaataagtgatgaatacagcaacataatacttcacaaaatcattctgggtatgtttgacaaagaagaatgttacacagaaccttcttgtgctacccatgtgaagtgttcttctctctcactttagtctcaattcccaaccttacaattaccacatactcacatacacagaaaaagaaaaattaacttattttattagaaggccatgattcacattttattctattacatcttttccatatcgctgttataatagtgttgaagtgaaccctctttcaccagaagaatacctttgtgaatgtgaatagactgacactggagaagaccagctcagcacactcacttgaatgatccctttgtttttcaggcagtaaaaatgcctttgaggggggaaaataaagtgactgcggattaagcagacagctatacatggaaaaatatttgtcaattgtttgaagattacactgcatggtctacaacttttaaaatataaaatgcatagcataactattgcacaagaaaatagaataaaaatgatgcagttgaccacaaaggacagcaaagctgtattatagcaatatagaaaaatatatatctactgtcagaagaaggtaacttgaagtatttgagagatgttctctaagaaactaaaaatatgtttagttttagattctgtaaaaaatgtttcttaagcatttttaattttcaaaaaaatttgagctcatattttgtcagcttagtatttatgaataatttaaataaaatagagtaaaatacacattaaaaatagcttttctggtaatacagcagttgaatttttagattaaaaaagtaaaattctacaaaattatatgctgaccaatttaatcagaagcttctttcttacaactgtgagaaatgacacaaagattcaacttttatgttgggtgggagagaaaatgattaccaggggctagaaaattgttgtttcactaatcaatgttgatttttattgctatattgtctcaaattatgttaataataatgtaatggccttgatccaaaaaatgtttaaaaactttattgtttcaatcagccaaaatattaaccaaaagaaggcatagaaataaaggtatctaagtcataatttatagtataaaattaaaatgtttctagaaataaaaaaagagatacataagtaagaaaaggaaaaaaagtggattactcacaataactaaggtatgaaatcaacctaagtgtacatcaacaggtacatgaattttaaaaagtggtatatttacacaatggaatgctctttattccttaaaaagaaaaatgtcttagaggtgggctcagcactctgtgtcttagcaagccttgcagggactctgatgtgtgctgaagtttgagcgtcactggaatggatagtgtccatatgattgcagggtcaccccacctatcctgaatgtcaagaacatcctgaatgagaccagtcagtatattgtagctttttctccagccacaaccagaaagtctttgcttcccctttgccttccaccatgattgtaagtttcctgaagcctctgcagctgtgtgaaactagaaaaagatgcacactcaaaaacctcatttgaaatttccagacagaaagccaagcgtttggagagtctctatggacagttttaaacacaaatgcagaaaagaaagcaaccctattcagtgtgaagatgatgagaatgaagacctttatgatgatctacttccacttaataaatagtgattcctgaatccttgacacagcactcagctaccaatgccaatgaataagaatttgcatcacagttgaaatctgttcaccactccttttgtagatgttctgaattgtgtaccagaagtcaattgttattgggggaacccacccccaatatttcaacataggttctttctattttctgtaagtgtcagctggtctgagaaataaagagaaagagtacaaagagaggaattttgcagctgggcctccaggggtgacatcacatgtcggtaggactgtgatgcccacctgagccacaaatccagcaagtttttattaaggacttcaaaaggggagggggtgtacgaacagggagtacatcacaaagatcacatgcttcaaagggcaaaaagagaacaaagatcacatgcttctgaggaaatagggcaaggactaaaagcaaagatcacaaggcaaaaggcaaaattagcattactgatgagggtctatgttcagctgtgcacgtattggtttgataaacatcctaaacaacagaaaattgggttcgagagcagagaaccagtctgaccacaaattcaccagggtggggtttttttccccaccctaataagcctgagggtactgcaggagaccagggcatatttcagtccttatctcaatcacataagacagacactcccagagcggctgtttatagacctcccctgaggaatgcatttctttcccagggtcttaattattaataatccttgctaggaaaagaattcagtgatatcttccctacttgcatgtccatttgtaggctctcctcaagaagaaaaatatggctctattctgccctaccccacagtcaggcagaccttatggttgtcttcattcgttccctaaaatcactgttattctgttgtttttcaaggtgcactgatttcatattgttcaaacacacgttttacaatcaatttgtacaatactggtcctgaggtgacatacatccttagcttaggaagataacaggattaagagattaaagtaagacaggtgaaagaaattatgagtattatttgggatctgataaatgtccatgaaatcttcacaattgatgttcagagattgaagtaaagacaggcataagaaattataagagtgtttttagggaagcgataaatgtccatattacaatgaaatcttcacaatttatgttcctctgccacagctccagccggtccctccatttggggtccttgacttcccacaacaaattgtctcattattaagatggcttctaaagtgattcatttttgtgacacataataagtgttagctgaggtctagctgtatggtgaaaagggctgatgaaaaatgtctacagagaggatagtcaacttatattaactgtgagttatactaggagctatacttaattcatttagactttatttggtcagctttttttatatttcaaaaaaagaacatttttaaaaaattaagtctttttaaatatatattctgctcaaatcaccatttcctttttttctgatgaaaaggaatttttcatgatctttcagggattatattttctttcaccttctatctgcattctctttcttcagctaattgattaaaaaagagatgcaaagaagacacatttgcttctcatccacacatcacttccacttgctattagtcattgtgagtagagctgagaaaagcagttttctagcatgacagcaacttctcagaaataaacaacactcggaaacaaaactataaatcttttcaaaagctaatgtattttaagcaaaataagcagatgcatcaataataaaatgcttgtggtagaatcgatttgttgatttcaattgagttcagataagatttgaccaaaatctagcaaacatagagcagaaaaaggaatattatctgaaataaggatattgtaaataaagttaatttgtcaatagaaacaataatattatgacctcatgataatagtctcatctacggttataaaacatcaaatgctactttttattataaactgtatttcacataagtattctatttatatcatcctctttcactatttgaatgccttccccactttatatcagtggaaagcaggccagctgcttccaggaaagcaggcaatgctcttcttactttaacaatgatgatgaagagcacttgttttggtgatactcctgtgccaaaaactgttattttgcctgaagtactggttttctatttttctctatattagtaaaataaaattcttaaccaagaggaatttatctcatccaagctttatggaattttgtttacatttaggtgtctctgactttcctggaatattgaaatttttatgaatctaaattgagtactataaataaacaatcttttactaaaagactttttgaagttggagtgatatttataaaaacttttcataacattgaagaaatgttttaaccatgttcccagtaattactctgaacatagaattttccatttttagtattcgctctgagtcacacaggggaaattgatatctttacgaatgggcaaaaaaaggtgctgagtggaggtgcaacacattgcacatcaatgcttttcacatgcacctattagggtcttaatttaattgaactgtcatttgcatagctagacacttattgaatctagtcatactattttttagcaactaatgccatgtttgttaccctttagttttatacacttatttgcttggctgaaaaaaataagtcttctcttaatttactctaaattgagagactagatttacagtctggggctataatagtagttgaatgtttttaatagtattattggcaaatgttcaattcacattcagaatggatataaactttatgaaaagatagggagctgacaaagagtaaaaaatttcaaataggttaagtaagttttgagacctattgcacagcagggtaactatagtaaactataaagtattgcatatttcaaaataactaagagtaaatttcaaatgtaccaccacaaaaatgataggtgagttcatagatatgttactaaacaaaacttaattattccatattttatacatatactaaaacatcacactgtatgccataaatatgtgcaactgtgatttaccaatcaaaaatactactaatactttttttataagagagagtgaagtaagatttaagatattgcaccagagaaaaatgtggttgttcatcttaaaattttaggaaacatacacatatatacattttatttcaaatggcttgctcatttatagatgtaggtaagtaaactttaaatatcatgaacagtcagaacccagcactcagaaatagacttgatttttaatgttcaaaataatataatactttgaaagacagactctaaagcaactgtttagagtaaaattctctctaaatttttaaataaatgatttccttcacttgttagaaaaaaattttaatatatatttttaaactatactgaaatttatcaaattaacataaaagtattaaacaagtaaacaaaaaacaatatgccttcttctctctaatgaaaaaactgacagacactccgcatttaaccaaatactttggtaaatggattctaacaatgatatctctcatgacttaaaacagccactagttttaacttagaattatattaaatttttatattaaaatctaggattagcttattattacatagaaaatttgtggtctgcatgtacatcatcatccattgagtggtctatagtttctgagtttcagaaatgctaatataagaatacttcttccaattgaataatttaagttttctcagtgactaaaaaagattggaattactgatcactcacttacaatggggttttaaatgttatttaatgaagatatataaagtttcttttaaaaatcattctaacaacatttcttttgctttttcacttttgttagaaaataagtacgaaaatttatgttactacaagcctataaattttatttaaatctagacataatgctaatcttaaaagatctgtatgtttaagattatggatactctatttacacttagaagataaataactgctttccagtaaatcaaatgaggcaattttgactgtcaattataagctattaaaatattaatactatcatctggtagaaattttaggtgtctgtatgttcaggttttttagcatataataaatcagaaactataaatttttagaaactataaataatacactaaaataaagtatcactttcgttttgtcagttttgaaatactgtcatttctagatgaaataacaattacagaggctgtggctgttgaaattagaaatgtcatggttcattcttctttacttgctgccttttcatttcacacaaacacagcagcacaaggaaggcaagaaatgccacaccttgattgaaaacatgccagtgcccatctagggagaataaatgtctgagcatattcacttgaaattcatggcatcttttgttcaactacagactttcatatggaaattaataaagaaaagaatttcacactgcaatagcgtaagaaaagtactctaaaaataccttctgacccattatttctatttttcacaagaatgattgtgatggaatgagcatttgcagcactgtggtcttaaataacccccactttctgttgaattatttttggaatacaaccataagacttttgtgcttttttttttagaaaaaatgttttatatttctaattcagtaatttagcataatttttagtctcacccattcacaaatagttcattctgaaaaaaaaaatgattaatccaattacattttcccccaaaagagtacagtaacaaattaagtctatagtgtagtgtacagttaatacataaataataaaggtgtaatttgttttacttgcacacttgaaaataaaacactttttgggctatagactaagaaatttcaggttagcttataaaatgtgaggagacctggtatagaaacattcaccaccatgccttaaggggtgaaaaatttgtctttcacccctaatttcaactattaacccagcactggaaaaatagaacatgtcattataccaaaaaacattttattatttttattttatatttaaggtacatgtgcagatttgtaaaacaggtagactacatgatgttgaggtttggatacttaataattccattgcccaagtagtgtacatcatacctaagcagattttctatgcttgtctcccatccttcctccttctttttagaattctcagtgtttattgttttcatctttgtttccatgtgcgcccaatttttagcatccatgtatgagtgagaacatgtggcatttgtttttctgatgcaataatttgcttagaatggcctgaagcagagctgcattcatgttgctgcaaaagacgttacttcattctcttctgttgctgcatagtattggaggttgtataagtacatcatttttcttatccaataaaagattcatgggtaactggttaaattctgtttttgctattgtgaatagtgctgcaatgaacatgtgagtgctggtgtctctttggcaaaattatttattctttttgggggcagatatccagtaatcggcttgattggtcaaatggcaattctatttctagttctttgagaagtccccaaactgctttgcacaggttctgaattaatttgcattcccaccaacagtgtagaaagatttccttatctctacaacttcaacatcttatttatcttacttttaataagtcattcttactggtatgaaatagtatcacactgtcactttgatttacatctttctgataattaggaacgttgagcaatttttacatgtttattggcagctcttatgtcttcctttgagaagaagctggctattcatatcatgtttgcttttttattaaatgtattatagattctgtacattaatccttcattgtctgcagtttgcaaatattttatttcatactgtaggtcatctgtttactttgctgatagtttcttttactgtgcagaagctctttggcttagatgccattttttatttttatttttgttgcactcatgttagatgttagtcataaattctttacagaggccagtattatctaagtgttattctaagatttttgtagcttggagactcacagatcaagtctttaatctatattgagttgttttttttttatagaaaaaggtagtacagttttcttccacatatgactaaccagttttcccagtattacttactaaatagggagttaattccccttttgtttatttctgttggctttgtaaaaataacctgattgcaaagtatagcttaattcagtactctctcttccatttcattggtctagatgtttatttttgtaccagaaccatgttatactggttattctgatgcaatcttggctcactgcaacctccacctcccaggctcaaatggttctctttcctcagcctcccaagtagctgggattacaggcatgcaccaccacacctggctaattttttacatttagtagagatgcaggtttcaccatgttggccaggctggtctcaaacttctgacctcaggtgatccatccatctcagcctcccaaagggctgagatgacaggcatgagccaccatgcttggcccagatttattcttttagtctgaagttttcttggctatttgagctctttaattcttttgaatgtattttagaatagttttctttttctaattcaataaaaatcgtcatggatagtctgataaaaatagcacttaatctgtaggttgctttaggcagaatgaccattttaattatattatttgaatccatgagcaatatttttccatttatttgcattgtctctcgtttctttcagcaatgttttgttgttctttgtagagatattttacccccttgatttaatgtatttctaggtatttttttgtgtgtttgttgctattgtaaatagagctgtgttttttattttgttctcagtttgaatattattggtgtacagaaatgctatgcatttgtgctgattttgtattctaagattttttttgaagtctttttccaggcttagaactcttttggtgaaacctttaaagtattctaggtggacaattctttcatcagtaaagataatttgactttctttgttttctgtttggattccttttattctctggctaggatttcataacttcaataggactgtttagaatggatattcttatttttattctcatggagaatgcttccagtttttgctcttttagtatgatgttggctaaggatttgtcatagatgactcttattaagatattttcatcaatgtccagtgtgttgacaacatttttgagttaatattgggttttcttgaatgctttttctgcccctactgttatttttttttcttttaattatctttacatggtgaatcacacttattgacttccatatcatgaaacaccttcatatatatggaaaagctcacattaatgtagcaaaataactttctgatttgcttttgaattcagtttgctagtatttcatggaggattattattccaatattcacccagaatattgacctgtactttcctttttttgtggtgccttcactagattttagtttcatatatttcactgatttaatataacaagttagggtgaaatcccaccttgattttttcgaatgcattcagtaggcttaggtaaaactctttgcaatgtggtaaaacttcgctgtgatttcatatgatccagggctttttatggttagtaggtttattattacttatacaatgtcattatacattttatacatttttgctctgctaaagacttctgttattaggccaggcactgtggctcatgcctgcaatcccaggactttgggtggccaaggtgggcatatcatgaggtcaggagatagagaccgtcctggctaatatggtgaaaccccatctgtactaaaaatacaaaaaattagctgggagtggcggcgggcgcctgtagtcccagctaattgggaggctgaggtgggagaatggcatgaacctggaagctagaccttggctaatttctttatttctttttagtaaacatgtttagtaaacatttctttttagttccactatgttggcaaggctggtcttgaactcctgacctcaggtgatctgcccaccttggcatcacaaagtattggccacagtaagccaatgtgtctggaaaaaaaaaaaatctgtgttttgaagaaaaaagtatactttaaatttaattataactcttcaaagatctacttcttttaaagttatatacaaataattcttctttttgccaactttagttttggattttttcctatactcagcagtctgatttagtgtaatatctgaagtttgagtgacaggtatttctactgtgaattagctgatatttacataaacttaattttggattaaatattttttatatttactgtatctgcaaaaacatattttagtataaacgcatttgtgttttataatctgtagtttttgaaaaaatgtttttccaaatttattaaatttgcagggttattcttcaatataaattccctgatgttgagcaaagttggaacaactacctcaggttttcctgtagtacaaaatgtgtacaataaaatctgtgatacaagtacatgtactacaaccctcttaatatttataatgtgtttcctcaaaataaatattcttctgtactttaacagcttttattttctgaaagatctagtgacagtgattgcacttttaatacttttatttagtatgaactctctgatgtttaataagctgtgagaagatattactggcattaacaaaaatttttttttccagacagtctctctctgttgcccaggctagtgtaaatgctttcctttgcaataaggcatgagcactggttaaatgtttgtcacattgtttattacagtagttttctccagtatgagttatcttacctacaatcaagtgtgacagccacttaaaggctttgtcatattcttcacttttctaggatttctcatctgtacgatttcttttatattcagaaaagtctgaggtgttgccaaaagcattgtcacatctttcaggtttgtagagtctctcttgtgtatgaattagcttatgtctcttaagaattgaggatctattagaggctttcccacattcttcacacatgcatggtttctctccagtatgagttgtcttatatgtagtaagccttaaggactggttaagggcattgcaacattccacacaattgtaggaattccctccagtatgaattacatgaatgtttagtaaggattgaggaatagctaaaaggcttgccacattcttcagatttgtagggtttccctcctgtacaaattcccttatgttcagtaagcgttgagaattaattaatagttttgccacatttttcatatttgtagggtttttcctccagtatgaattcttttatgagtagtaaggtgtgaggaccagttgaagtctttatcacattcttcacatttgtagggcttctcaccagtatgaattctcttatgttccataaggtttgaggactggttgaagcctttgccacattcttctcatttgtagagtttctctccagcatgaattttcttatgtgtaggagggttgggaactgtttaaaagctttgccaaattcttcacatttttagaatttctctccagcatgaattttcttatgtttactaaagactgagaaccagctgaaggctttgccactttcttcacatttgtagggtttctctccagtatgaattttctatgataactgagggttgaggaccacttataggctttgccacattctttgcatttgtatggtttctctccagtatgaattaccttatgtttagtaaggattgagaacatactaaagcctttaccacattcttcacatttgtagggtgtctctccagtatgaattctcttatgttccataaggtttgaggaccagttgaaagcctcaccacattcttcacatttgtagggtttctctccagtatgaattttcttatgataactaagggttgagggccacttataggctttgccacattcttcacatttctagagtttctctccagtatgaattttcttatgtttactgaagactgataaccagctgaaggctttgccacattcttcacatttgtagggtttctctccagtatgaattaccttatgtttagtgaggattgagaacgtactaaaggctttgccacattcttcacatttgtagggtttctctccagtatgaattttcttgtgatatctaagggttgagggccacttataggctttgccacattcttcacatttgtagagtttctctccagtatgaattaccttatgttttgcaaggattgagaacataacaaagcctttgccacattcttcacatttgtagggtttctctacagtatgaattttcttatgataactaagggttgaggaccacttataggctttgccacattcttcacatttgtagggtttctctccagtatgaattaccttatgtttagtaaggattgagaacgtactaaagcttttgccacattcttcacatttgtagggtttctctccagtatgaattctcttatgttccataaggtttgaggaccagttgaaagctttgccacattcttcacatttgtagggttcctctccagcatgagttgccttatgttcagtaagtcttgagggccagctgaaggctttgccacattcttcacatttgtagggtttttctccagcatgagttgccttatgttcagtaaggcttgagggccagctgaaggctttgtcacattcttcacatttgtagggtgtctctccagtgtgaattttcttatgttccataaggtttgatgaccagttgaaagctttgccacattcttcacatttgtagggtttctctccagtatgaattaccttatgtttagtaaggattgagaatgtactaaagcctttgccacattcttcatatttgtaaggtttctcttcagtatgaattttcttatgataactaagggttgaggatgacttataggctttgccacatgcttcacatttgtagaatttctctccagcatgagttttcttatgtttactaaagactgacaaccagctgaaggctttgccacattcttcacatttgtagggtttctctccagtatgaattacctcatgtttagtaaggatggagaacatactaaaacctttgccacattcttcacatttgtagggtttctctccagtatgaattttcttatgataactaagggttgagggccatttataggctttgccacattcttcacatttgtagggtttctctccagtatgaattaccttatgtttagtaaggattgagaacttactaaaggctttgccacattctttacatttgtagggcttttctccagcatgaattgccttatgtgtagtaagggttgagaccttactaaaggttttgccacattcttcacatttgtagggtttctcatcagtatgaattctcttatgtttaataaggattgcagatcggttaaaagctttgccacattcttcacatttgtagggtttctctacagtatgaattttcttatgataactaagggttgaggaccacttataggctttgccacattcttcacatttgtagggtttctctccagtatgaattaccttatgtttagtaaggactgagaatgtactaaagcttttgccacattcttcacatttgtagggtttctctccagtatgaattctcttatgttccataaggtttgaggaccagttgaaagctttgccacattcttcacatttgtagggtttctctccagtatgaattaccttatgtttagtaaggattgagaacttactaaaggctttgccacattctttacatttgtagggcttctctccagcatgaattgccttatgtgtagtaagggttgagaccttaataaaggttttgccacattctttacatttgtagggcttctctccagcatgaattgccttatgtgtagtaagggttgagaccttactaaaggttttgccacattcttcacatttgtagggtttctcaccagtatgaattctcttatgtttaataagaattgcagattggttaaaagctttgccacattcttcacatttgtagggtttctctacagtatgaattttcttatgataactaagggttgaggaccacttataggctttgccacattcttcacatttgtagggtttctctccagtatgaattaccttatgtttagtaaggattgagaatgtactgaagcttttgccacattcttcacatttgtagggtttctctccagtatgaattctcttatgttccataaggtttgaggaccagttgaaagctttgccacattcttcacatttgtagggtttctctccagcatgagttgccttatcacattcttcacatttgtagggtttctctccattatgaattaccttatgtttagtaaggattgagaacatactaaagcctttgccacattcttcacatttgtagggtgtctctccagtgtgaattttcttatgttccataaggtttgaggaccagttgaaagctttgccacattcttcacatttgtagggtttctctccagtatgaatgacctcatgtttagtaaggattgagaacatactaaaacctttgccacattcttcacatttgtagggtttctctccagtatgaattttcttatgataactaagggttgagggccacttataggctttgccgcattcttcacatttgtagggtttctctccagtatgaattaccttatgtttagtaaggattgagaacttactaaaggctttgccacattctttacatttgtagggcttctctccagcatgaattgccttatgtgtaataagggttgagaccttactgaaggctttgccacattctttacatttgtagggcttctctccagcatgaattgccttatgtgtagtaagagtcgagaccttactaaaggctttgccacattcttcacatttgttgggtttctctccagtatgaattatcttatgtttagtaaggattgcagattggttaaaagccttgccacattcttcacatttgtaggatttctctccagtatgaattaccttatgtttagtaaggattgagaacttactaaaggctttgccacattctttacatctgtagggtttctctccagtatgagcactcttataataagtaagggttgaggaccagttaaaagctttgccaccttcttcacatttgtaggaattctctctagtataaattcttttatgttgagataggtgtgaaagcatgcaaaatgatctgacgtattctttacattgcaaatgtttctttccagtatgccttatcttatgtctgtttgaatttgaacatttatgaaagacatttgcatatttgccacgttgaaatactttgctctgtgtagttgtcaaactctggttaagtttattataaccttctttgtgcaccttacactcatccacattggtataaccaatttttaagtgtaaattctcatgtccacatttttcataccttctcaatatcactttttggaaagaatcttctatgccctgctctggccaaagatcttgagcaaaatgagaacatataactgaaaagaaataaaaatcacaaattagcctacttattagactcagataaatacagtttctaaatctaaactataaaattattcaaactacataagcaagatgacactgcaatatgacacaggccctaattcttcatagacatataaatctaataaaaacatatagaccgaaatacatatgtggataatttatacatgagttaagtgtgtgcagtgcctgaattaagctgaatgcagagtcacacagaaaaaaagaaaagtttgttaaatttacccagtacgactctttctgttcctcaatattacctagtaccttcagaactaaattgtcaacttctgtttgtgtttttttgttttgttttgttttgttctgtttttaaggaaagtaaaatattggcacaaaaaatttaatttatgtcttctacagccctttccacacactggtttctgtctcccatgacataaaatgctgaaagatatggtggtatacttagaaatgacagtttgagtctgctgagaccaaaggtaaatgcactgcagcagagcactgcagtcctgcagagagagaccagatgtaccaagtgattacttttcagaagaaagataaataatctctctcaactaaaagtaaatgcaaaacttcagacaagaaatctgaagatgtttgagaggcccacataatcttaacccagaccattgttttctgactatgccaggacaaagctacattataaattttgtgacaggtagcctttttaaatgtccaaatctcaaagattaaaatctatacaatatagggcaatataattccatcaaaaatattatacaattttcagaaagaacccattagcaatggatatactaattttaaaaactgaataacactcaatgagtgaaataggaacacaaaagtgtatagaaaatcagaaaaatgaggataagaacaaaaatgaccagtgaaatgtcaacaaaagatttgcagtccagaagaaaactgtgtgatatagtcaaagtccaaaaaaaaaaaaaaaaaaaaaaaaaaaagctatcaagtgagaataataccatcagcaactctgtcctgcctaatgggggaaaaaaaacaactttcaaaataactaaattcttaagaagtatattagcactgcatatgtcttccataagaaagatgccgaaagcagtttttaccactgaaaataacataatgtaagaaaacaacacctaatcatataaaaatacattattttctaggaaagacatgcacagacaaaaaattgaatttctagcattattctaatggtgcagaaaacatttttaattattctctaacatttaagagataaaagcataggaattattataaacatctgttaatgaatatacgacataaatcaataaacttagcaacatcggtgacaaatttaagagcagacataatagggaagaattttttatgcaaccaaagttaatttttcacctgattaaaatatattgttgtatttttaggttctatgcaatccccaaggtaccacacacacaaaatatctgtatacatacagaaaagaaaactaagatagtgaaagcatatccatacaaaaatcagacagaaacaaaggaagacagaaagagaaaatgagagacaagatgcaagaatcaaatagaataggtaataaaagtaactccttcactttcagaaaattatttaaatatatggaaagttaactttcaaatcaacagatatctaatagatttattaacatttattcttttgagacaaagttttacttttgttgcccaggctggagtgcaaagaccctatctcagctcacttgaacctctgcctcccaggttcaagtgattctcctgcctcagactcccaagtagctgggattacaggcatgcaccaccacacccagctaatttctgcattggtagtagagacagagttttaccatgttggccaggctggtcttgagctcctgacctcaggtgatctacctgcctcagcctcacaaagtgctgggattacaggcatgagccaccgtgcccaggctattaaaaaattttaaatatcaagatccaacttgcctttctacaagagtcagttgaaacctaatgttaaaaagactcaaagtggcaagatggaagtagacatttcatgcaaatattaatcaaatgagagcagaagaggtcaaaataatattacacaagctaaatcttaagtcaaagactcatattttataaaatgcactttacagtgaaactccaaagagacaaagaaagatattaaaaataatggattaactcagaacctgtgaaaacgttgaatacgtgtgtgtgtgtatcacacattaggattacaaatacagaaagcaaatactgacagaatagaagaaacacaaggagagcaatacaattatagtaggatattattacaccacactttctgtaataaaaatcaaaatagaggaggctgccaagatggccaaataggaacagctctggtctacagctcccagcgcgatcgacacagaaggtgggtgatttctgcgtttccaactgaggtactggtttcatctcattccaactggttgaacagtgggtgcggctccctgagggcaagccaaagcagggtgggatgtcgtctcccctgggaagtgcaacgggttggggaactccctctcctagccaaggtaagggtttagggactgtaccatgaagaaccgtgctctccagcccagatactgtgcttttcccatggtcttcgcagcctgcagaccaggagattccctctggtgcctatgacaccagggccctgggtttcaagcacaaaactgggtggccatttgagcagacaccaaactagctgcaggaggctttttttcccccataccccagtagtgcccagaagtccagtaagacagaaccgttcactcccctggaaagagggctgaagccagggagcaaagtggtctggcttggcagttcccacaaccagggagcccagccggctaagatccactggcttgaaattctggctgcaagcacagcagtccaagctccacctgggaagctcgagcttggtgggggaagggcgtccgccattgctgaggcttgagtaggcagctttaccctcagagtataaacaaagccacccggaagattgaactggatggagcccatcgcagctcagcaagaccagactgtatctcaagatgcctcctctttgggcagggcatctctgaaaaaaatgcagcagccacattcaggggcatatagataaaacgcccatctccctgggacagagcaccttggggaagggacagctgtgagtgcagcttcagcagacttaaacatccctgctggacaactctgaagagagcagtggaggtaccagctcagcatttgagctctgctaagggtcagactgccacctcaagtgggtccctgacacccgtgtctcctgattaagagacacctcccagtagaagctgatagacacctcgtacaagagagctctggctggcacatggcaggtggccttgggacgaagcttccagaggaaggaacaggcagcaatctttgctgttctgcagcctccgctggtgatacccaggcaaacagggtctagagtagacttccagaaagctccagcagatctgcagcagagaggcctgactgttaaaaggaaaactaacaaacagaaaggaatagaagtaacatctccaaaaggatgtttactcagaaaccccgtccaaaagtcatcaacatcaaagaccaaaggtagataaatccataaagatggggagaagccagtgcaaaaaggctgaaaattccaaaacccagaatgcctgttctcctccaaaggatcacaactcattgccagcaaagaaagaaaactgaatggagaatgagtttgacgaattgacagctcaaatttgacaaatttcagaggtgggttataacaaactcctccaaactaaaggagcatgttctaacccaatgccaggaagctaagaaccttgaaaaaaggttagatgaattgctaacgagaataaccagtttagagaacataaatgcctgatggagatgaaaaacacaccacgagaacttcatgaagcatacacaaatgtcaacagctgaatcgataaagcggaagaaaggatatcagagactgaagattaacttaatgaaataaagcaagaagacaagattagacaaaaaagaataaaaagaaatgaacaaagcctccaagaaatatgggactatgtgaaaagaccaaatctacatttaattcgggtacgtgaaagtgacagggagaatggaaccaagtaggaaaacactcttcaggatatcatccaggagaatgtccccaacatagcaagacaggccaacattcaaattcagaaaatacagagaacaccacaaagatgctcctcgagaagagcaaccccaagacacagaatcgtcagattcaccaaggttgaaatgaagaaaaaatgttgacggcagccagggagaaaggtcgggttacccataaagggaagcccatcagactaacagtggatttctctgcagaaaccctacaggccagaagagactggggggccaatattcaacattcttaaagaaaggaattttcaaccaagaatttcacatccagccaaactaaacttcataaatgaaggagaaataaaatcctttacagataagcaaatgctgagagattttgtcaccaccaggcctgccttacaagagctcctgaaggaagcactaaacataaaaaggaacaactggtaaaccagccactgcaaaaacataccaaattgtaaagatcattgacactatgaagaaactgcatcaactaatgggcaaaataaccagctagcgtcataatgacaggatcaaattcacacacaacaatattaaccttaaatgtaaacaggctaaatgccccaattaaaagacacagactggcaaattgaacagtcaagatccatcaaagtgctgtattcaggaaatccatctcacgtgcaaagacacatataggctcaaaataaagttatggaggaatatttaccaagcaaatggaaagcaaaagaaagcaggggttgcaattctagtctctgataaaacagactttaaaccaacaaagatcaaaagagacaaagatggtcattacataatggtaaagggatcaatgcaacaagatgagctaactatcctaaatatatatgcacccaatacaggagcaccgagaatcataaagcaagttcttacagacctacaaagagacttagatacccatactatagtagtgggagactttaatatcccagtgtcaatattagccagatcaatgacacaaaaaactaagaaggatattcaggacttgaactcagctctggaccaagcaaaccaaatagacatctacaggactctgccacaaatcaacagaatatacattcttctcggcaccacatcactcttaaattgacaacatacttggaagtaaaatactcctcagcaaattttaaaaaatggaaatcataacaaacagtctctcagagcacagtgcaatcaaatttgaactcaggattaagaaactcactcaaaactgtacaactacatggaaactgaacaacctgctcctgaatgattatagggtaaataataaaatgaaggcagaaataaaaaagttctttgaaaccaacaggaacaaagacacaacacaccagaatctccgggacacagacaaagcagtgtctagaaaatatatagcactaaatgcccacaaaagaaagcaagacagatctaaaattgacaccctaacatcacaatgaaaagaactagagaagcaagaataaacaaattcaaaccctagcagaagacaagaaataactaagaaaagagcagaactgaaggagatagacacaaaaaatccttcaaaaaaatcaatgaatccaggagctggttttttgaaaagattaacaaaatagactgctagccagtctaataaagaagaaaggagagaagaatcaaatagacacaatcaaaaataataaaggggacatcaccactgattccacagaaatacaaactaccatcagacaatactataaacatctctatacaaataaactagaaaatctaaaagaaatgaataaattcctggacacatacaccatcccaagtctaaatcaggaagaagtcaaatccctgaagagatcaataacgaattctgaaactgaggcagtaattatgagcctaacaaccaaaaatgtccaggacccgatggattcacaacctttgtaccagaggtacaaagaagagctgattctattatttctgaaactattcccaacaatggaaaaagagggactcctgtctaactcattttatgaggccagcatcatcctgataccaaaacctggcagagacacaacaaaaaaagaaaatttcaggccaatatccctgattaacatggatgcaaaaatcctcaataaaatactggcaaactgaatccagcagcacatcaaaaagcttatccaccaagatcaagtcaggttcatctgtgggatgcaaggctggttcaacatacacaaatcaataaacataatcgctcacataaacacaaccaatgacaaaaaccacatgattatctcaatagatgcataaaaggccttcaacaaaattgaacagccttcatgctaaaaacttgcaataaactaggtatagatggaacgtatctcaaaataataagagctatgtatgacaaactgacagacaatatcatactgaatggtcaaaaactggaagcattccctttgaaaactggcacaaaacagggatgctctctctcaccactcctattcaacatagtattggaagttctggtgagggcaatcaggcaagaaaaagaaataaaggatattcaaataggaaaagaggaaatcaaattgtctctatttgcagatgacatgattgtatatttagaaaaccccactgtctcagcccaagatctccctaaatggataagcaacttcagcaaagtctcagaatacaaaatcaatgagcaaaaatcacaagcattcctaaacaccaataatagccaaatcatgagtgaactcccattcacaattgctacaaagagaataaaatacctaggaatacaacttacaagggatgggaaggacctcttcaaggagaactacaaaccactgctcaagaaaataagagaggacacaaaaaatggaaaaactttccatggctgggcgcagtggctaacgtctgtaatcccaccattttgggaggccgagacgggtggatcatgaggtcaggagatcgagatcatcctggctaacactgtgaaaccccatctctactaaaaacacaaaaaaattagccgggcatggtggcaggcgcctgtagtcccagctactcgggaggctgaggcaggagaatggcgtgaacctgggaggtggagcttgcagtgagctgagatcgcaccactgcacttcagcctgggtgatagagcgagactccatctcaaaaaaaaaaaaaaaaaaggaagaacattccatgctcgtgcatagaaagaatcaatatcatgaaaatggccatactgcccaaggtaatttatagattcaatgctatccccatcaagctaccattgactttcttcacagaattagaaaaaaaaccgctttaaatttcatacagaaccaaaaaaaagctcatatagccaagacaatcctaagcaaaaagaacaaagctggaggcatcatgctacctgacttcaaattaccctatgaggctacagtaaacaaaacagtatggtactggtatcaaagcagatatatagaccaatggaacagaacaaaggcctcagaaataacaccacacatctacaaccatctgatctttgacaaacctgacaaaagcaagcaatgggaaaaggattccctatttaataaatggtgttgaaaaaactggctagccatatgcagaaaactgaaactggaccccttccttaaaccttatacaaaaattaactcaagatggattgaagatttaaatgtaacactgcaaaccataaaaaccgtagaagaaaacctagacaatactattcaggacataggcatgggcaaagacttcatgactaaaacaccaaaaacaatggcaacaaaagccaaaattgacaaatgaaacctaattaaactaagagcttctgcacagcaaaagaaactatcatcagagtgaacaggcaacctacagaatgggagaaaaattttgcaatctatccatctgacaaagggctaatatccaggatctacaaagaacttaaacaaatttacaagaaaaaaaaaccatcaaaaagtaggcaaaggatatgaacagacatttctcaaaaagacatttatgtggcaaacaaacatatgaaaaaaagcacatcatcactggtcattagagaaatgcaaatcaaaaccaaaatgagataccatctcatgccagttagaacggcgatcattgagaagtcaggaaacaacagatgctggagatgtggagaagtagaaaagcttttacactgctggttggagtgtaaattagttcagccattgtggaagacaatgtggcgattcctcaaggatctagaactagaaataccatttgacccagcaatcccattactgggtatatactcagaagattataaatcattctactataaaggcacatgaatacacatgttttttgcagcactattcacaatagcaaagacttggaaccaacccaaatgcccatcagtaatatacaggataaagaaaatgtggcacatatataccatggaatactaggcagccataaaaaaaaatgagttcatgtcctttccagggacatggatgaagctggaaatcatcattctcagcaaactaacacaagaacagaaaacgaaacacagcatgttctcactcataagtgggagttaacaatgagaacacagggacacaggaaggggaacatcacacaccagggcctgtcaaggggtgggggctaggggagggataacattaggagaaatacctaatgtagataacgagttgatgggtgcagcaaacccccatggcacgtgtatacctatgaaacaaacctgcacgttctgcacatgtaccccagaatttaaatcataatttaaaaaaacagaatattaataaggaaacaggctacataaagatggtataaaacaactatttctgacagaggtatagagagcactccttaacatcaggatacacacccttctgaatagctcatacaatatatttcttgatagaccacctcttaagccaaaaaagaagtcttaccaagttttttaaaactgaaattttatgaattattttctgtgactaaacttgaatgccagtatacaacaaaaatagaaaaaaactgaaaacaaaacaaatatgccaggtgcggtggctcatgcctgtaatcccagcaccttggaaggccaaggctggtgaatcacaaggtcaggagatcaagaccattctggccaacatggtgaaaccctgtctctactaaaatacaaaaaactagtgaggcttggtggcacgcacctgtagtcccagctactcaggaggctgaggcaggggaatcgcttgaacccaagaggtggaggttgcaatgagccgagataatgccattgcactccagcctggtgatagagtaagactctgtctcaaaaaaacaaaaacaaacaaacaaacaaaaaaaatatatatgaatttaacaaaacactcgagcatgctcttatgcaaaggttgtaatgttaatattgtaaagatgttcatcctattcaatgtaatctataaatttaatgaaatgtttttcaaatttctccttgcatttttgaaaaaatagaaactgcaaccctaaaagtatatagaatctcaaaagacaataaagtacccaacaatcttaaaataataataataaagcaatgttgcaggcattaaagttcctgatttcaaaagacattccaagccacagaattaaaacaatctggtataaggatgaaaaatcagactaaagaaatagaatgcgacacatatactttaacatgtatagtcatatgaggagtcatttacatagcaataattattactgtaagctagtaggtaaaggcaatgcaaatttctgtcaccaaatcattcagtaaatataatctgaaatataaatatactggaatatcactcagttttaaaaaagcagaaaatattctaccaattataacgataaatcttgataacattatgcaaaatgaaatgagtcagccacaaaaagacaaagattgtatgagatagagagatataaagcatttaaactcttagaaacagataaaaacaaaaaggtctcctatttgcttaacccccaacagcaagaaagtttgtcagtcatccgtgacaaaaatatcttaatgagggaaccaggcatcatggttaacatctgtaatgacagcaacatggtacagtaaggttggagaattgcttcaggacaaaattttaagaccaacctgggttatgtagtgaaaccccatctcaaaaataagtgcctttaagagagctttgagatccagggaggcaattgtgaaactttgctaaagcccaagattgaggagcacccttttcagcaggcaagctttcattcaagtggcaaactacaggacccctgctcttgactacagaccagaaaatgtcccacccaacttggtcccacggagaattttgaacttactctgtaaccatcccaaactcctcccagccacagtctgtgagaggtctttgtcttccagaagcctggagagagatacccatttagagccatgacggcaggccggcagaccttggtccttactgtggttccaataccagtttcatgactcagttccagtttcctaagccacggttcatggccacttctgcccatgtagaaacctacagtgacctcagaaatgctctctggtactcagtgaaaccatactaatccacatcctattataaagcccaccatacgcagacctgactgcagaaacctgccctagcatctgataccctactgagcaaagtcctgagggatatttactctgtccaaaaataaaatgggaattacaactaccaaagccccttatagtaagccaactctattgcagagccagcagccctgtgaccgagctacaaccctctgaaaccagtttataaaaactttaagaggtgtttactccttcaaattcatacaccaatgcaaaagtatattgtgttcattgtcaatgcttctattttaacacagcacttgaagtatgtggaagaaaaattagtcaaaaaaattttaatgtcattgaaattgaagacaaataagtaaaacattgctgtttgtaaatcatgcaatgttctctataaaaaaccataaacagtacattaaaaccttttcaaaccaataaatacactcagtaaattagcaaaatataaaattaacatacaagttatgtttccatacacttaaactatctgataaaatagagtaataaaacaatcttatttacaatagcactaaaataataaatatctgagaacaaatttaactgaggagttgaaaaagttttcaagtgcaagatttatcaatgaaaaataatgagaacacaaataaattcaaatacattttatgcctatcaattcaaagaataaatggtaaaatgccatattatccaaagtgatctctagattcaataaactctctatcaatattccagtgtttttttcacagtaatgaaaaatacaatcataaaatttacatgaaactacaagaaactgtgaatagccaaagcaatcttgaagaaaaagaaaaaagcagaaggacatcatactttataatttcaaactatatttcaagactacagtaataaaaacaggatgaaatgtacagaaaaatgaacaaaaaaaccccaaagatacagaaactactactctcacacatttcagagatgatggaaagagagaacttataagatagtttaacatggagtatcttaaaatcatgcagatatctgtgtgtccacaaaaacaaacaaacaaaaagattgtgcactctcttgtatgccatgaacagtactttggctgtcactgtaaacttgaaggaagattactgaagggaaagaagaattcttagaaattttaaaagtgtaagaccgaagatgcccctgtgtgagagaaaattaaagaataaaaataaaaattagtctctccagaaactacttcttttggaacacagcttccagaatcactttaaggactggcttcctccttgactttcgacctctcatccatgttgtctgtattcactctcacctacctggggattcttccaccatctcatgtctcttcatattccaggactcttttccttcctccagaaaaatgatcaggtctggcttaaaggcagcaatacctgttttattaaaaatgaacaacatgcttcttgctcatattctccaattaccaactcagtaatgtgctcagtaaagaggatgtaatagaatattctaatagatttatcccaaaatactaaattataataagttgggaaaaaggcttatggggtgcctgtataagctggccataaaaatatgggacaatatgttgtggaaagccacaggaggcctccgaggaggaaagcctccttactgccatcacgttcccatgaccagagcgtgacctgctctcttacttataaacactgtgctcaaggagaaagatactcctttgaagcactggaatgtggccagatatgcaggctcctagttaggcccaccccccaacagctgctctccggtaagttaaagaatgaatcagtagttaagtttattctgcttcagcacaaagaaactttgcctaaaccaccactgctatagattaggtgtatgacacactacctccctttcaccatttcacccctgaacatctgcttcttagatctaagtgattatactcaataaatactgtggagaccagaacttgatgccttttgcagcctccaaaagtgcaactggtcccctggcaccccaccctttgtgcactcttaacctgtctcttctcattccttcgtcgccaccggactttctgtaccctacaggtggtattgaagctggtccccaacaataacagaaatttctaaatatttagaaaattctctaattttgtaggttcttaattttatcacctagtaatactgaattaaaaattggtggttgccagtaaacttttgaaattaccattaatctaaagtgaaggacacagatcagctcaagaatgtggtaagttcaggtcaagatgaaacatcttgaattttttttctatatggaaaaactcctatgattttcttgaaaatagaaatctgaaagcataaattaccaaaaagaaattatacaaaaaagaaatggtgttgggagctgaaagcctgagggtcatgaccaactcagcattccactggaggctatatgataaacagcaaacagtttatcatgaatgcagaatgtgggcaaacttgcttctgctcctgccaccagaaggtacactgaggacagtcactccctggtgccatgctccttgaagttatctactggaacatctggagagtgctgttgaaagaatacagtcatgcaggccttcattaagtcaagcagctgaccacaacctcccccttctccctatctcctttactcaataaatacaaagggctatagaagctcaggacccttgttgactagaagcaaggaggcccctgaccccttcttccaaatatactcttttgtctttgtctttattctcacattcatcctccgttgttcagtccaataaggtctgcagcaaaatgaaacctgtagtgtatactaggaattgcgtattaaagttattctcacccaggaagaccaggtttctgtagttctctaacatcacatttctatataaattctgctgtgcagtgtccaggcattgccactcctccagagagaattctatggccacatccctaaatgtcaatgatccctggaaaacacaaacacacatatttatcaactggacatgggcagaatttttaatttgactcaaggtaaaatgcagagagtaaagagagctggttctgacttataagcatgactgaaattattcaataaaataatttttaacacaaatattctctaacatattctctctcttttttctttttttaattattattatacttcaagttttatggtacatgtgcagaatgcgcaggttaattacatatgtatacatgtgccatcctggtgtactgcacccattaactcgtcatttagcattaggtatatctcctaatgctatccctccccccaccccccaccccacaacagtccccagactgtgatgttccccttccggtgtccatgtgttctcattgttcaattcccatctatgagcaagaacatgcggtgtttggttttttgtccttgtgatagtttactgagaatgttccaatttcatccatgtcccaacaaaggacatgaactcatcattttttatggctgcatagtattccatggtatatatgtgccacattttcttaatccagtctgtcattgttggtcatttgggttggttccaagtctttgctattgtgaatagtgccgcaataaacatacgtgtgcatgtgtctttatagcagcatgatttatagtcctttggatatatacccagtaatgagatggctgggtcaaatgttatttctagttctagatccctgaggaattgccacatggacttccacaatggctgaactagtttacagtcccaccaacagtgtaaaagtgttcctatttctccacatcctctccagcacctgttgtttcctgcctttttaatgattgtcattctaactggtgtgagatggtatctcattgtggttttgatttgcattactctgatggccagtgatgatgagcattttttcatgtgttttttggctgcataaatatcttctttggagaagtgtctgttcatatcctttgcccactttttgatggggttgtttgtttttttcttgtaaattagtttgagttcactgtagattctggatattagccctttgtcagatgagtagtttgcgaaaattttctcctgttttgtaggttgcctgttcactctgatggtagtttcttttgctgtgcagaagctctttagttcaattagatcccatttgtcaattttggcttttgttgccattgctattggtgttttagacatgaagtccttgcccatgcctatgtcctgaatggtaatgcccaggttttcttctagggtttttatggttttaggtctaaagtttaagtctttaatccatcttgaattaatttttgtataagatgtgaggaagggatccagtttcagctttctacatatggctagccagttttcccagcaccatttattaaataaggaatcctttccccattacttctttttctcaggtttgtcaaagatcagatagttgtagatatccagcattatttctgagggctctgttctattccattgatctatatctctgatatctctgttttggtaccagtaccatgatgttttggttactgtagccttgtagtatagtttgaagtcaggtagcgtgatgcctccagctttgttcttttggcttaggattgacttggtgatgcaggctcttttttggttccatatgaattttaaagtagttttttccaattctgtgaagaaagtcattggtagcttgatggagatggcattgaatctataaattaccttgaatctataaaatacctagtatggccattttcacgatattgattcttcctacccatgagcatggaatgttcttccatttgtttgtatcctcttttatttcattgagcagtggtttgtagttctccttgaagaggtccttcacgtcccttctaagttggattcctaagtattttattctctttgaagcaattgtgaatgggagttcactatgatttggctctctgtttgtctgttattggtgtataagaatgcttgtgatttttgtacattgattttgtatcctgagactttgtcgaagttgcttatcagcttaaggagattttgggctgagacaatggagttttctagatatacaatcatgtcatctgcaaacagggacaatttgacttcctcttttcctaattgaataccctttatttccttctcctgcctaattgccctggtcagaacttccaacactatgttgaataggagtggtgagagagggcatccctgtcttgtgccagttttcaaagggaatgcttccagtttttgccgattcagtatgatattggctgtgagtttgtcatagatagctcttattattttgagatgcatcccatcaatacctaatttattgagagttttattctctaactctgataaaagaaagtggtataagatccataacatcagtttatatgtaatatttttctagataataaagtataaactgagggcataaacactaacatgtacaattttgagtgctatatttacatcatacagaattaattgtgtgccaggcatggtggcttatgcctgtaatcctagcactttgggaggctgaggcaggcagatcacctgaggtcgggagttcgagaccagcctgacaaacatggagaaaccctgtctccactaaaaacacaaaattagccaggcatggtggcgcatgcctgtaatcctagctactcaggaggctgaggcaggagaatcgcttgaacccgcgaggcagaggttgcggttagccgagatcatgccattgcactccagcttgggcaacaagagtgaaactccatctcaaaaaaaaaaaaaaaaaaagaatcaattgcatttttcaaatggaaagacatagttttgtgtattattcagatggaatagatgtgttgagttagaaggtatcactcaaattttaatgtgtacaacaagctagagatcctgttaatgcagattttttttttccagaagatctgagataaagtctgagttactgaatttctaataagctcataagtatgccaaagtttttggcccaaaaagactattttgtcaaatatccagtaattgaatgagcctgtgtttttctcagtttttctggtttgtaaacaaagatgagaggtttcattttccaaaaacagacaaatggaaaggaaacctaagaaagaagggcagcagccagattaaatgtgttggtttattcacatcagctgcataaagatacttgatgatgaagagaaaaataattaattctatagtgaaaaaatgtgtcagaaagcttatcaaccaagtgatttattaacatcaactacactagaacacatttttataatgtcctgatgcacccagaaggacgcagcattactgctgagatattgccccctgaaaggtaaattatagtctgagtttaaccataaggaaacattagttttatggaaagttcaagatacagatatctcccatgttctgtaatttttagtagtgattttaaatagtctttctttagcactgtagaaagcgggtatctcctaacaatttttaaagaattttctgggtaataaataccatactgcttcaatgagtgttttcttatcctgtactgcagagacataataaagaacacagatgaaaccacaacattatatgttctgtcttcactaaaaaccccaggttttccccaataggaattttgagtgtctacatcttcccatgttccacagccacaaagggacatttttaatattgcagattataaattcatagtgagatttctgcatggcatagaagaagccgtaatatagagaaggctctggtatacagaaaaaatatatatttttcagagactttgattattgtcagaattttttcaaatagttaagacaaactcattagggaggaaaaacacaaatacagaagtacaggtttgcaagtactaaacacatgttttctggaggaagcagactggacacagatcttgatctgagacatgtttagctgaaaaagaaaaggccatttttttctccttctcctccttctctaggattctttctcaaataaaattttctagacaaattacacctgcatcttgagaatatgcctttaaaagtgtcagcaccacaggtctacctgctgtcaccacatccacaggcagaaggaccaagacagaaaaactccatccatttctgtcctttatagccgaagagattaacaaagagtagctccacagagataaaaatatgcttttctttattttgtcctcaggagccatcccctgacacaggcaccagcaatttctgccacagtaatggaaatatgggccacgctgtactgtccctaccaaatccaaacagaattaggttcttggaccaccctttaatgcaaagatggaacttaactctcatgaatgtattttgaattcctcatacttgattctggcctcaccttagagtcacatgagccacttaattaaaacaacatggatgcttccaccaagaacaataaacagaatccatggacagggcacaagtaaaaagagttctgcaaaatggccaagtgatactaattagaagcctgggctgataactccttaagtaagcatttcctctcaagctctaatgagcttataaaatcacttggtaattttggccccactctatgaaatgtaattctgcaggtatggaaagggtccataaatgggtcttttaaacaaatgccctgtcaataatgatgttgctcccactgggcttattattagcattagtcagagaaatgaggcacaatgcagagtcccttacacgcagcactcttgtcaaaacacaaatacttctggtacaaatgaagacaatcattcttcatcctaaagtattatattctttgctgactctttaaagtttgcagaggaaaaaaaaaagcagcaatttctgagtaagtctgcatttggaaaacaacatgtgcacatgtactactacaatgtttattaagcaggtactatgtgctcaataggaagttacagagcactgtgatagcacattatgtgatttaatcctaataacaccctttcagttgatactaagtgttcaataattccaaggctttaaaggacccagcatttttatttctatttctgtttaactgtcattgattttttcaaaaaatgtatagaacaaaagctaaatatagacagatgaaagggatacagatggaaagagtttaatgcaatttagatacatttttattgtgtttatatttactttcttgtgacttgtgaatcaactactagatctggaggaacagaaaacaagctgctaaataaagtctcttcaagcactggttttaataaaaaatttgaaaagtaagatcctataatacatactttatatttcccatttatctgcttttaagtttcagaaaatgttgaacaccagctctaaaaaggcaacaggattcatgacccaaaactctgatctcttctaatcggttctttcaggcaagactccagggtagggccagacataaataaggcctccaaaaaagggtgaatatgaacagggctggggcagagtgtagagccgatgtacaattctgttctctatgccactggggggtactgtcagttcttttttttaagcttacttaagtaaacttaaatccgagtttgtataattttaatcttttttagccactgccctgtaaattttatattacatactaataagcaattcaaaaaaaaatcccttaaggttttctagaataatttttttagaagaaaaataagtattcttagcagggtaaaagaaatacaaataataataatgactcttccgtttataagttcaggtgtagacatcagaaaccacaatataaagaaagtggctcaaataaagcccaagttgttttttgtacatatctatttattgtacccaccatatgatccataattcaaccatttttccagttgctagtctagactacaacttccaggatggtagcaatcatgactgcttatctgtttttcttttctttttttttttttttgagactgagtctcactttgttgcccgggctgtggtgcgatggtgtgatctcagctcactgcagcctcctcctcccaggttcaagagattctcctgcctcagcctcccaagtagccaggactacaggcatgagccaccacacccagctaatttgggtatttttagtagagatgggatttcaccatgttggccaggctggtctcgaactcctgacctcaggtgatccacccatcttggcttcccaaagtgctgggattacaggtatgagacattgcacccagcctgtttcttctatttttttatgactatatgaaatggaagcaattagtttatctgtttgagcctccagacctcctgattttttacccaagtaccagggaactggaaaaactctcatctggctaccaaccagagatacttcttgtataacgggtgaaacaaacacgagatgactcatttctctcacactgggacagaagcagaattaatcactcttgtcagcctgacacaattctgttctggacattctccaatgtctcagagattcataggtaattgttagacggttccctgtgaacctgggctgatggtccaatgataagacaggcagagaagactcaggatgattctaaataaaaaaatggaactactttggctcaactccagaatccgggttgtccgtcctgatttgctagctgttgggtaagtagaaggacaagaagactctactccagtatcacattttacaggtaggtatagttgtggtcatggctctggatactttgtggtcttaagatgcttgtttacacttacagattctgccatcagattctatttactcctggagcctctcatataactgtggcaggttaatgaagaagatgtgaaaaggtcaaaaagccacactcccaaaaaaggaatttaaaatgtctatgttgatatctcacaatgcagaaaatgcctcctgttggttttctgtaaattctcaatccaaagtctggccctgccttgtaaatcccagcagaggccaggtcttatttgcaaattctaggtgaaatcaacctcactctgcatttttgggtgttacagcaagtagagtgaaatcaaaggagagattccctcctagaggctgctctaggatattctaaataatattttaccttaaaaaagctgacacaacatgaacataagcagacagtttatttgggtcaagcttaagtattttaacttgagacaaaatattcaagttgcctggaatctacactttcattagcagcacttacaagtggatttgtgaaggcaaaaaagaggaacagtgagtgagctgatacaaaattggttgtgagaaattcttatttatgtaaagaaataactttaataattgattggatatacatcattaaggttaaggatatggaatatagtgtccagtgtagaattattagtttaatttatagctacttgtggcaatagtgaacagtttcaatagataaatatatagctgaaaaaaaggagaaaaacgtaattgtgctctcattttaatgtttctctgactttagtaactaaaaggacttgcattcctcagataaaaacttatttttttcttttcaattctcaagacttagatttagaatacggagctgcaaattcaggtcctgcatgggtaaagtagcaataggtgttacctgaacatttgtgggcattttagcatgaggagggagggagaagtggattctcacgtctacaggtctactcagtgcacatattttactctgattgggtttctgtgccccatggtcactgaatcagtttcaggtctgaagacacaagtcattgaaagaggtaaaatggttaatatctgacctatgaagtttgtagaaatctgttctagcctctctaaaagtgactgcagaggatgatagataccaagtacgtagagacacaattccacctgcatatttagggtacagcatgcacttcacagcacaactgtgaattgactggaagcctgagtggaaaaggcccatctagagtaaagcttagttggcaccttatgtgtttgtattatgtctggtaattctagacaaggtttgggaaatataattagaagcacaattttcttcagccccagaggaactccacataacagaacagaaagaaaattgttttattacacaattacatgtgaatatgacatgcattatagtcaatttgctcaagagattgcaaagacagaaagacagtgaccataatttgtctacaagtagaatttacagcaccatgtcatacatagttcatcctaaattcacatggtagttgggaaggccatccatgtatgctaattggttataatcaatgacaaaataaacttttcacatcttcatgactggaggtagttttgcaacttgaaccccggtgcctactgaaggtaggctttgactcttctacaaaaagtgttgattcgggtgctatctttttggctatttacattttaaagcaatagctctctactccctgagcactgggctagagcactcctgctttccctctcttggtggctagtgtactctcttgaccccaccatctgccactgaggcacagcccacagcacagggctcacagctggaaactcacatcttaggtgaaccccatttgccacagcagcactccagtggcacatcagacagtgaagcctgagcagcaggaggagagcctgcaggcctcctgggtagaattgcaccttcacaataatagaaaagggagcactgtttcagcctcagtttttatttataatggtgacatgaaaaaaatactgctgggttttagcatgagtccagatagagacagctctgagagttctcactgtgacagctcacgtctttcacagacaccacgggatactaatagggcttctcaaacagacacacaatgcattagagagaaaaaactgctctcattctgagaaagattatgttgagagaaaaaagttaaaagtgtcttaagaaaaaactgagattagatataagattgatcaagtcagccagaaaatatttccctaagaagaatttctctccaaacacccaaagtgcatagctactctcagcaagggaaacatgagcattattgaataaagggggcacattctcagcaaaaaaaaaaattttttttttttgagatagagttccattcttttttttttttttttggacagagtctcactctgtcgcccaggctggagtgcagtggcgcgatctcggctcactgtaagctctgccttctgggttcacgccattctcctgcctcagcctcctgagtagctgggactatcggcgtgtgccaccacacccggctaatttttttttgtatttttagtagagatggagtttcaccatgttagccaagatggtctcgatctcctgacctcgtgatccacctgcctcggcctcccaagtgctgggattacaggcgtgagctgccacgcccggccaaggagtttcattcttgttgccctggctggagtgcaatggtgtgatctaggctcactacaacctctgcctcccgggttcaagcaattctcctgtctcagcctcccaaatgactgggactgtagacacacaccaccacacctggctaattctgttatttttggtagagacgaggtttcaccacattgtccaggctggtctcaaactcctgacctcaggtgatccaccccccttggcctcccaaaatgctgggattacaggcatgagccacagcgcccagctctcagcagaattttaaaagatttatcttccatctctgctgttctcttatttcctaaccattgaatgtgagatatattggaatatatctgacaacttccaccagcacttttttataaaaattgaaatctgactgtgttaatatagtagaatatattagagcttgcaacatagctaactggagagcaattacggtttttgggtagccatatcacttgtctttgtcctgtaatagtagcaagctaatttggtaaaatatatgacactaaaattatgctataattttatagcataattttatgctataattttatagcataattttatgctataatttataaattatatacctataatttattcccattggataaattaatatgcatgtcagactaatatctactataatgatttaatggtaaatttttttggatatcagatacaaatatgtaagtatgaataattttatgtactactcataatgtatgtaagattttaaaaaattatctgaactatacttcagttgaaacactatatttcaaaaatatgaataatattaaaataactaaggaattcaatctaagtaaatacgtggccttaaattcatactattgtagaaaatactgtttatatgaatgcaggttgtctacaaacactacacataactatactaactgtactgaagtaacccaagtacaacagactccactgttcagtctatacactgaactcttctggcttttgcagtgtaagtatgtcagccagcaaataatcaccctggataatcaggtttctgccaaagaacttactcaggatcttttagtctttattattctgtattgctaaatttaatccaatctttgtgctcaacttctttatgctcttgaaatgaactttactctgaacaaatttgtgtctactttaaagactaaagacaaaaaaaaaaccaatattttgccaagacaaaaagaaagcaatgaatctcaggtcccagataaagacaattctgagtcaaaaagaatgacaaatggtttgtgttattgctaatatgatttacatatatttcaaaaagcagaaaaaatatatacatataatctaaaccttttataaaaatcagcaagttatcctcccttattttcacatatgagaataaagcttcttatttctaatttatattttgtcttacaacagccaggtctctggacaagttcttgaactcttggacatctgaattttgcacactgtgtgcacttgaaagaatgtttatggggggaaaagcagaagagaggaaggtgttataaaaaaactccatgggttcacatgaataaagcaagttcttagagacctatgaagagactcagaatctgacacagtaataatcggagactacatctgacaagcactaatggacagatcattgaagaagaaaattaacaacaatattacgacttgaactcaacacttgaccaaacagtcctaatagacatctacagaactcttcatcgaaaaataccgtaatatatgttcttctcatcaccatgtggcacatactctaaaattgaccacacaatcagaaacaaaacaattctcagcaaattcaaaaatccgaaaattatacaaaccacacacacagattacagcttaagaaaaaaatgattcaataccaataaaacaactggaaactatacaattaaataaaaattaaatggcctacacttgaataactttttggtaaataatgaaattaaggcagaaaccaagaagtgttttgaaacaaataagaacaaaaatacaacacaccagaatccctgcaatacatctaaagcaatgttaaaagaaaaatttatagcattaaatccccagatcaaaaagttaaaaagatctcagtttaacaacctgacatcataaataaaagactgagagcaacaaaagcaaatcagcccctaagctagcaaaagacaagaaataaccaaaatcagatctgaactgaaggagatttagacatgaaaaattacaaaatatcaagagatccaggtataaaatctatttttttaaaaaaggtaaataaactactagctagattaatgaagaagatacaaataaacacaattagaaataaaaaaaagagacattagcactgaccccacaaaaatatactgaagtctgctatgcatataaacaaacaaacaaacgaaatctagaagaaatgaaaaaattcttgaacaaacacatcctcccaagactgaacacacacacacaaaaatcaaagccctgggctgagtgcggtggctcacacctgtaatcccagcactttgggaggctgaggtgggtggatcacctgaggtcaggagttcgagaccagcctcaacctggggaaaccccgtcactactaaaaatacaaaattacccaggcatagtggtgcatgcctgtaatctcagctactcgggaggctgaggcaggagaattgcttgaacctgggaggcggaggttgcggtgagccgagatcgagccattgcactccagcctaggcaacaagagcgaaactccatctcaaaacaaacaaacaaacaaacaaaaaatcaaagccctaaatacatagataagctcaaaatattgaattagtaataaatagcctaccaactaaatgaagctcaggaccagacatactcacagctgaattctaccagatgtacaaatagaagctgatattatttttactagaacaatttcaaaagattaaaaagaagaaactcctctccaactcattatgtaagaacagcatcattctgataccaaaacctaacagagataaaacaaaaaaaggcaacttcaggccaatatccttgaaaattgatgcaaaaatcttcaacaaaaggctgggcctggtggctcatgcctgtaatcccagaactttgggaggccaaggtgggccaatttcctgaggtcaggagttcaagaccagcctagccaacatgatgaaaccctgtctcttctaaaaacacacaaaaaattagctgggcatggtagcacacacctgtaatcccagctactcaagaggctgaggcaggagaatcacttgaacctgggaggcagaggttgcagtgagccaagattgcaccactacactccagcctggatgacacagtgagactccatcccaaaaaaaaaaaaaaaaaaaaaaaaaaaaagaaaaaagaaaagaaaagaaatcttcaacaaactactggcaaaccaaatccagcagcatatcaaaaagctaacccactatgatcaactatggtttattttggggatttaaggtttgctcaacatacagaaatcaataaatgtgattcatcacataaacagaattaaagacagaaagcacaagattatctcaatagatgcacaaaaagctttcaataaaatttaacatttttcatgttaaaaaccctcaacaaactaggcattgaagatgcatacgtcaaaatagtaagttatctatgacaaacccacagccaatatactgaatggacaaaacctggaagcattccttcttgaaaactggcacaagacaaggatgccttctctcaacactcctatattcaatataaaattggtagtcttagccagagcaatcaggcaaaagataaaaataaaaggcatccaaacataaagagaggaagtcaaactatccttatttgcaaacaacatgattctacatctggaaacccatatactctcagcagaaaagctctttaaactgacaaacaacttcagtaaagtctcaggatacaaaagaaatgtacaaaaattagtagcaaccctatatatcaagaacacctaggccaaatccgaatcgaaaacacaatcccattcacaactgccacagaaaagaataatatatctagaaatacagataaccagaaaggtaaaagatctctatgacaagaattacaaaacaatgcttaaagaagccagagatgacacaaacaaatggaaagcaactttatgctcatgaataaaaaagatcactatcataaaaatggtcatactgcttaaataaatttacagatgtaatgctaatttaatcaaaccaccaaaatatttttaacagaactaaaagaacaaactattttaaaattcacatggaaccaaaaaagagcctgaatagccaaggcaatcataagcaaaaacaacaaagctgaaggcattacattacctgacttcaaactacacaacagtgctacagtaaacaaagcaacatggtactggtacaaaaacaaactcataggtcaatgcaacagaatagggagcccagaaataatgccacacacctaaaaccatctgatcttcaacaaaggtgacaataggaatgtgggaagaatttcctatttaataaatggtgctagaataactagctagcactatgtagtagattttttataacaccatataaaaaaatcaactcaaggtaaataaaagacttaaatgttaatcttaaaaaggatatattttaaaaaaccctggaaggtaagaagtgccattctagacatagaaactggcaaagatttcatgatgaagatatgaaaagcaattgcaacaaaagcaaaaactgacaaatgggacctaattaaactttttcacagcaaaggaaactatcaacagagtaaacagacatcctacaaaataatagaaaatatttgcaaactatgcttctgacaaaggtctactatctagaatccataaggaactaaaacaagtttacaagaaaaaaaaactaaaaagaagaccaaaaaaaaacatgaaaaagacgtttgtcttcaaaaggagacaaacatgtggctaacaagcatgtaaaaaaatgctcatcactaatcattagagaaatgcaaaagaaaaccacaacaagaaatcatctcaaaccagtgagaatggccattattataattcaaccattgtgaaaagcagtgtggtgattcctcactaaactaaaaacaaattaccatttgacccagtaacctcacaattgggtatatacctaaaaatatataaattattctatcctaaagacacatgcacaatcacgttcattgcagcactattcacaacagcaaagacatggaatcaacctaaatgcctatcactggtagactagataaagaaaatatagtatggttgggcatgttggcacacgtctgtaatccagcacttcgggggatgagctaggtggattgcctgagctcaggggtttgagacaggcatggacaacatggcaaaatcccatctataaaaaaaaaagtacaaaaataaaaattagctaagcatggtggcacagactttagtcttagctacttgggaagcttaggtagaagaggattgcttgagcctgagaggttgaggtttcagtgagccaagatcacaccactgcactccagcctgggaaaaaggtgagaccctgtctccaaaaataacaaaaaaattaaaaactttattaataaacttaataaaaacaaaatatgggctgggtatggtggctcacacttgtaatcccagcactttgggaggccaaggcggcagatcacctgaagtaaggagttcgagactagcctggccaacgtggcaaaaccccatctatactaaaaatacaaaaattagctgagtatggtggcacacgcctgtaatcccagctactccagaggctgtggcagaattgcttgaacctgggaggtagaggttgcaatgcgccgagatcaagccactgcactccagcctgagtgacacagcaagattccatctcaaaccaaacaaacaaacaaatatggtacataaacaccatgaattcatgaaatactgagtggccataaacaacaacaacaaaaaaaacaagattatgtcctttgcagcaacatggatgaagctggagatcattattcttagaaaactgatgcggaaacagaaaaccaaatgcatgttattatttataagtaagagctaaataagaacacatgaacacagaggggaaaaaagacactgaggcctagtagagggtggagggtgggaggactaaaagggtcagaaaaagtacctttttggtgctatgattagtactgcagtgacaaaataatctgcacaccaaactcccatgacataattttagctgtataacaaagctgcatgtgtacccctgaaccaaccaaaaataaaagttaaaagaaaacaaagtccctgggttggagagagtgcaatgcaggtggaaggactggtttgtcctatagatagtggcccaggtggggctgtactctgatttatttctgggtccatgcaggcagataagattatgaaccctaggctggtggagaaaacaggttgctactgcagattcagtgtctgaaaatagagatatgccaggagacttgtagacacttttgtggtttttggccaaaaaaaccactaggatcaaaaatgctgtggtaaaattcctgagggtggtgccttgtccagagaggagtgtggacacatcaatgtcaagtgggtgtttgtgagtgggtagaaatcctctgctggcagctgtggcaaaagggggtttgtcatcagatctcttttaagttttcagtcctctgtcaccctgggaggagatctgaaatcaaagaacaaggggcagtgtgacagcctgtgtagaggagatcagagcttcccattcccagacacccagagtttcattccaggccaggagtctgtgatatctttcttctggcaccaaatctgcagagtttgatgaacaccaacaattctccaacagcaactcattgtctaacacttgaattctgacaccacccagagtcagcacagaccctgattcagggctcagtcccacaacattgtcctcactgcagatgccagtcacaaaccccatgggctcatctatgcttctgacctactgtttaaaaattggggactcccataacctttttgaaattcaataacctgatacagctactcacagaactcagcagaacactagttatacttactggcttcaaataaaatatacaacccccaaaaagtcaaatggaagaaaagtatagaaccaagaaaagaggtgggaaaagatgaagcatatagataataaatagccgggattagtaaaattctctatcctctgtgttctccaggaacacttatgaaaagaaaaacccttctcatcatgacttagatggtgctcttttcttacctactacacaaccaggaaaacactctgcatattttcttcttcttctcattaaaaaaatcagctgaatttgccttcagtggtcaacataaaataccttttaatcaaacttaagtttattttcttcccacaggctcctgaactctgagctactctcagtccgagccaccatacaacctcattttatgctactgcagattcagtgtctgaagaacactcctaagaacacactgacttcagggtaaaacattctctgatctaaaatctgattatttcacccttcatttaaacattcccctcaccttctttctaatcttatttgcttttccctaggaaaaaaagcccttttctacctaatctttgcaatccttaaagatcttatagttggtacttcctcctgttgtaatactcctttggaattcaattttttttttaatgtacgtctaactggtttattttaaaacctctcgaatctgcctcaaaacagtaacaatttactgtttaacaatttagggctagggttcagtttagggttaggtttagggttccgtaagacacccccaaacctcttctatcttaaccttaactgcatctgcctgtggggccccagctttccagggctctgtagcttctctcactatagaggcttcttccatggctgcggtaagcaggctgggacatctgcaggaaaggctttccagaaggaactaactgggcctttaataacctccgtctgctggctcaaaattaaccttagcttgcagtcattaggctcaagctttaatttaccatgtcagagtcattcacttagtttttgaaattgtgtttgaaaaatccagcaaaatgattcaaaaacagtgttcatataagaaaattttaaggtgcttaccttttgtacctcagtaagagaagcaaatgtatttatttcttttggacaataaagcattattttattttttgtattaaaaatcatgtggtaaacagttatatgggaacacttctaggaggtaccaagtttcatgacataaaatttaccattaaactcagaaatcgaaaaacaggatatagaacaaagatatttatttttgcaaattcaccctgcaagaaaagaaactgatgttttcacgaatctgtgtaactcaccaattacctaccgcattttcttgtggaaatatattaattctctatagccaaaatggaagaaaaatttttatttttttcctcagtagctaacattctaaaagctagatggaattctatttgaaatcactcagccataaaaaacacacctgagggccgggcacggtggctcatgcctgtaatcccagcactttaggaggccgaggcaggtggatcatgaggtcaggagattgagaccatcctggctaacacggtgaaaccccgtctctactaaaaatacaaaaaaatttgctgggcgtggtggcgggctcccactatttgggaggctaaggcaggagaagggcgtaaacctgggaggaggagcttgcagtgagatcccgccactgcactccaacctggggacagagcaagactctgtctccaaaaaaaaaaaaaaaaaaaaaaaaagtaacacctgaaaaaactcctaaattcactctgagaaaataaaagatgaatgagaattttcaacaaataaaatatataattagatattgttttttgaaattcacctttttttatgccctttgtaaatattttcttacctttcaagccctactaataaaatgcaatttacagttaaaaaactgaggtcagccgggcacaggggctcacacctgcaatcccagcactttgggaggccaaggcaggcagattacttgaggtcagaattttgagctcaaacagcacggtaaacatggcaaacccccatctctattaaaaatacaaaaagtagccaggtgtggtggcaggcacctgtagtcccagctacttgggaggctgaggcataagaatcacttgaactcgtgatgcagaggtttcagtgagccgagattgcaccactgcagtccagcctgggtgacagaggaaagcactgtcttaaaaaaaaaaaaaaaaaagggccgggcgcggtggctcacacctgtaatcccaccactttgggaggctgaggcagccagatcacaaggtcaggagttcgagaacagcctggtcaatatggtgaaattccgtctctaccacaaatacaaaaattagccgggtgtggtggtgcacacctgtagtcccagctactcaggaggctgaggcagaagaattgcttgaacccgggaggcagaggttgcagtgagcagagatcataccactgcactccagcctgggtgacagaatgagactctatctcaaaaaaaaaaaaaagaaaaaaaaaactgaggtcaaaataagtgaacaatgcatttaatcatttcaaggtacagatatgtctgactcatgtgtcaagtcaggccatccaattacttgagagattctcccaccccatcctgttcacttaagtgctcagtaaccattctctcaggagactctgaactatgccccagtgagtgccccaggtacattttactttgcaagttcttgcaccatctcactggggtcagtttttttttttgtctttggagtgctattttttttcacaaactttttaccatttttatttcactatttttctgtcccctaagagaatccaggggcaaaaattattttggtttccccttcaataccagcatctgattgtctgaacagcaatatgtctccaagaaatggaagctgcgttgggtaaagacaacactaatatctcaaggggttagctttccaaaaaaacagcacaccagaagatgcctctcagccccagggtattcacctgctctcttgagaggctacactccatatctcatgttgtgttatgggagaagagaggctacactgtgtacctcaggttgtcttatgggagaaaatgacccaggagctgatattcactagacgctctcgcagacatagccatggcgggtatcttagtttttccccagatagtactgaatctcaggtccaagaaaaaactgaagggtgtctgaggacacatctccctataaagtttccaaagggaaaccttgacccaaaacattctgatatctatgtctacggaaaacagaagaaaaaatatttacaaacagaaaacaaatctttttaaatgtgccatcaaatgctttgtcaaaaaatgattacaataggtatcaaaatgtaaactaaaggacaaatagttgatcatgtgaataagggaggggaaattggcgtttgggaatgtcagaaggaactggaaattaagtattttactgcaagccagagtcaggctggagaaatagggggtggcagatagacttgaggtcctgcttgggacacatgtgaaaaatgcaaggaaacagcaattccttgtggggtgtgaaaataattaagtggctggcagttagactgaggaggctctagtttctaatttctacttttaaaaaatctaattcggccaggcacggtggcttaccctgtaatcccagcactttgggaggccgaagcaggtgaatcacttgaaatcaggagttcgagaccagcctgaccaacatggtgaaaccccgtccctgttaaaaatgcaaagttagagggcatggtggtgcatgcctggaatcccagctacttggaagtctgaggcaggagaatcatttgaacctgggaggcggagattgcagtgagcccagatggcgccactgcactccagcctgggcgacagagtgagacttggtctcaaaaaaaaaaaaaaaaaatctaattcaaatgcattttttgtaaattactacattgggggaaaaaatttcaggcttaacacactataaactgccaattaacctctgattacataaccaagaaacttccatcttgatgttacaaattaagaaaccacaaggccgggcgcggtggcttacgcctataatcccagcattttgggatgccgaggcgggcggatcacgaggtcaggagatcgagaacatcctggctaacatggtgaaaccctttctcaactaaaaatacaaaaaagtaaccgagcgtggtggcgggcggctgtagtcccagctactcggaaggctgaggcagtggaatggcgtcaacccgggaggcggagcttgcagtgagacaagatcgtgccacagcactccagcctgggcgacagagggaagactccgtctcaaaaataaataaataaataaaacaaaacaagaaactacgtaactgtacctaaccaattattgaatgtggttttcctcgttatgcaccttataaaactctttccgtcaaaccccttcaatagaccattaactacaacccatagctgggtgctctacaattttggaatcactctttgattaaattctttaatatttttgaggtgacttccataaatttttaataggagaaaacaggaactgggagcctcacggaccaaagctcttcccattcatgaacccacaccccaagtcaggattctcctctcacgaccctctcatggtccctgcacatctgggagagactccgcgctgcgggtgcagagcggccccaagagggctccaggccagggcacaatcacagcgcagggaagagacaggacgcccggggaccgggtgtcagcgcagcctccatcttatggctgaaccggactgaggtcgagctaggcaagaactcggggcacagatgtggagctgactgcggggaggcctgagtcccgccacagccacttcccaccggttccaagcagcccgggccactctctcagtgtgtcggacccggcacactcaccatttctaggcttccagggggtcctggcgacttagttgtggatctcccaatacctgcaggtcatagggccacagaggctgggactctaggagcagaggacacacagcagtaaggacgagaccttgacctccggctgcagcgagagacaaaggaccgaccacatcccggaagccgacctgtcccctccagctgcctgcctgattggacgttcccagcccagcatccctgattggataatgtttaaggccccgccctttcaggccctgagtgacagaagatgtgatcagatgctgggctgaatgaagaaagagagccagcgtaggctgcaacctttcaggcagggcttcctccctgagctgagccaggcccaccccagagcatgcgaatattctatctcttctttactctctctctttttaaatgtattcgaaatgtgaacgaatatattttactgccatgttaataatacataaaacttttgttccagagtaaattaatttttactttagtcatagtgtgttatcaatactaaaggccgggcgcgatggcttacgcctttaatctcaacagtttgggaggccgaggagggcggatcactggaggtcagaagttcaagaccagcctggtcgatagggtgaaaccccttctctactaaaaatacaaaaattagtcgggcgtggtggtgggcgcctgtaatcccagctactcaggaggctgaggcaggagaatcatttgaatccaggaggtggaggttgcagtgagccgaggttgggccattgcactccagcttgcgcaacaagagtgaaacgccatctcaaaaaacaaaacaaaaaaattaaacttattttagtaaaaccttataaataaatccatcaaatttgtcacttttccaacactctacattttcatatatattttataatctcacatttttttaactttttctattttattttaatagatttttttaacttgaaacaaccttaaattattattattattattattatggttgttgttgttttttgagacagagtcttgctctgtccaccaggttagagtgcaatggcatgatctcagctcactgcaacctccgcctcctgggttcaagcaattcttctgcctcagcctcccgagtagctgggattacaggcgccgtccaccacacccagctaatttagcatggtgacctgaacttgtagttaccagctattcaggggctgaagtaggagtattgcctgagcccaggaggttgtggctgcagtgagccctgatcaagccactgcactccattctgggtaacagagtgagaccctttcttaaaaaaaagacaaagcatataaccttaaacttatgggagtttggggctttttatttttgtcttaaattattatatttcaatagttttggggtatacgtagtatttggttacatggataagttcttttgtggtgatttctgagatttacgtgcaccaatctcccaagcagtgtgcactgtacccaatgtgtagtctttcatccctcaccccctctcccacccttcccactgagtgcccagagtccattatataattcttttatttatttatttatttattttctgagacagggtttcattcttgttgcctgggctggagttcagtggtgtgatctcggctcaccacaacctccacttcccaggttctagcgattctcctgcctcagcgctcccaagtagctaggattataggcatgccccaacatgcccggctaattttgtatttttagtagagacagggtttctctatgttggtcaggctggtcttgaactcccgacctcaagtaatcgcccgcctctgcctcccaatgtgttgggattacaggcgtgagtcaccgcactcagacccattatataatttttatgcctttgcatcttcatagcttagctcccacttataagtgaggacatacaatatttgggtttttatcccctatttcttttttttttttttttttgagatggagtttttttttgtgatggagtttgctgtgattacaggcatgagccactgtgcctggcctattttttgatgttttaattatggtcttttctgtttgtttgtttttgagatggagtctcgctctgtcgcccagactggagtgcagtggtgcgatctcggctcaccgcaacttccgcctcccgggttcaagcgattctccagcctcagcctcccgagtagcaggcattacagacacacgccatcgcgccctgctaattttagtatttttagtaaaggcgtggttttgccatgttggccaggctggtctggaactcctgacctcaggtgattcacctgtctcggtctcccagagtgctgggattacaggcatgagccaccatgcccggccaatcatggtcatttttgcaagagtaaggtggtatcacattgtggttttgatttgcatttccctggtcattaatcattagtgatgttcagtattttttttttctatgtttgttggccatttgtgtatcttcttttgagaattttttaagtcccatctgtctttgtttttgttgcatttgctttgggattcttggtcatgcactctttgcctaagtcaatgcctggaagagttttttcaatgctttagaattcgggttgtttcaggtcttagattaaagtatttgatccatcttgggttgatttttgtataaggtgagagatgaagatccgtttttttttatttttttttatttttttgagacaagtctcgctctgttcccagactggagtacagtggcgtgatctcagctcactgtaacttctggctcctgggttcaagcaattctctgcctcagcctcccgagtagctaggattacaggcacccgccaccatacttggctaatttttttttttttttttttgtatttttagtagagacagagtttcaccatcttggccaggctggccttgaattcctgacttcatgatccaaccacctcgacctcccaaagtgctgggattacaggtatgagccactgcgcccagctgaagatctagttttatttttcaatatgtggcttcccaattatcccagcaccatttattgaatagggtgttctttccccactttatatctttgtttactttgtcaaagatcagttggctgtaagtatttgggtttatttctgatttcactattctgtttcattgggctacatgtctatttttatacccatacaatgctgttttggtaactatagccttgtagtatagtttgaagtcagataatgtgatgccttcagatttttttgtgtgtgtttttggttttgttttgttttgttttatttttcttagtgttgctttgactatggaggctctctttttaatttatataaattttaggttttttttttagttctgtgaagaataataatgttattttgatggaaatcacattgaatttgtagattgcttttggtaggttgatcattgtcagagtaaaatcgctactcatccataagcatgaaatacatttccatttgtttttgttgtctatgatttctttcagcaacgttttgtagtttttcttgtaaagatctttcaccactttggctagacatattcctaacttttttttttgcagctatttttaaatgatgagttcttaatttaattattagtttggtcactgttagtgtacaccagtgccaccaatttgtgcacattcattttgtatcctgaaattttactgaatttatgtatcagattgaaaagttgttttttttttctttttgagacaaggttttactctgtctcccaggctggagtgcagtggcatgatctcggctcactgcaacctctgccacccgagttcaagtgattctcctgtctcagcctccctagtagctgggattatagccactcgacaccatgcccggctaatttttgtattcttagtagagacggggttttaccatgttggccaggctgctcttgaactcctgacctcatgatctgcccgcctgggcctcccaaagtgctgggattacagacgtgagccaccacgcccagctgatgctgtttattttttgctttactctgattgctctggctaagacatccattagtgtgttaaatagaagtggtgagagtgggcattattgtcttgttccagttctcagaaaaaatcctttcaactttttcccgttcagtgtaatgttggctgtttataatagagagctttttttttttttttttttttttttttccagacagagtctcactcagcccaggctggagtgcaatgtcaggatctccgctcactgcaatctttgcctcctggactcaagtgattctcccgcctcagcctccccagtagctgggaccactaggcacccgccatcatgcctggctaatttttgtatttttgaacagacgagatttcaccatgttggccaggctgatctcaaactcctgacctcaggtgatctgcccacctcggcctcccaaagtgctgggattacaggcttgagccaccacgcctggcctgtcatagatggcttttatgaccttacaatatgttccttctatcccgattttgctgaggattttaatcataaagggatgctggattttgccaaatgatttttctgcttatattgatataatcatgtagtttttggttttaattctgtttatttggtgtaaaacatgtattgacttacctatgttaaatcatctctgcatccctggcataaaatgttctcgattatggtgtactatcttattaatatgctgctgtgtttggttagctagtattttattgaagatttttgcatttatgctcatgaggaacattggtgtgcagttttcttttattatgtcttttcctgatcttggtattagagtgatattggcttcatagaatgatttaggaaggattccctttttctctgtcttttggaatagttgcagtaggactggtaccaattatctgaatgtcagatagaattgagctacgaatccatcttgtcctggactttttttgttggcttttttttttttttcttgagtcttgctctgtcacccaggcgggagtgcagtggtgtaatcttgactcactgcaacctctgcctcctgggtttaagtgattctccttcctcaacctcccgagtagctggaattacaggcacaaaccaccatgcctggttaatttttgtatttttagtagagatggggttttgccatgttgatcagactggtttcaaacccctgacctcaagtgatccacccacctcatcctaccaaagtgctaggattacaggcatgagccactgcacccagctggcaattttttattactagtttaatcttggtacttgttattggtctgttcagagcttttatttcttccgggtttaatctaggaggtttgtatatttccaggaatttatcgaactcctctaggttttctagtttgagcatgtaaaggtattccatggtagctttgaatgatcttttatttctaattgagcatatttggatcatagattcaatgctgtccccatcaagctaccactgagtttcttcacagaattagaaaaaactactttaaatttcatatagaaccaaaaaagaggctgcattgccaagacaatcctaagcaaaaagagcgaagctggagacattatactacctgacttcaaactattgtacaaggctacagtaaccaaaacagcatggtattggtatcaaaacagatatacagaccaatggaacagaacagaggcctcagaaataacaccacacatctacaaccatctgatctttgacaaacctgacaaaaacaagcaatgaggaaaggattccctatttaataaatggtgttgggaaaactggctagccatatgcagaaaactgaaactggaccccttccttacaccttatacaaaaattaactcaagatggattaaagacttaaatgtaacaccccaaaccataaaaactctagaagaaaacctaggtaatgccattcaggacatagacatgggcaaaggcttcataactaaaataccaaaagcaatggcaacaaaagccaaatttgacaaatgggacctaattaaacgaaagagcttcttcacagcaaaagaaactattgttggagtgaacaggcaacctatggaatgggagaaaatttttgcaatctatccatctgacaaagggctaatatccaggatatacaaagaacataaacaaatttacagcagaaaaacaaacaactccatcaaaaagtgggcaaaagatataaacagacacttctcaaaagaagacatttacgcagccaacaaacatatgaaaatatgctcattatcactggtcattagagaaatgcaaatcaaaaccacaatgagataccatctcatgacagttagaatgcaatcactaaaaagtcagaaaacaacagatgctggggaggatgtggagaaataggaacactttcacactgttagtgggagtgtaaattagttcaaccatagtggaagacagtgtgagaattcctcaaggatctagaatcagaaatagcatttgacccagcaaccccattactgagtatatacccaaaagattataaatcacatgaacacgtatgtttattgcagcactattcacaatagcaaagacttggaaccaacccaagtgcccatcagtaatagattggataaagaaaatgtggcacatatacaccatggaatactatgcagccataaacaaggacgagttcatgtcctttgcacggacgtggatgaagctggaaaccatcattctcagcaaactaacacaagaacagaaaaccaaacattgtatgttctcactcataagtgggagttgaacaatgagaatgcatggacacaaggaggggaatatgacacactgggacctgtcagattgaggggggctaggagatgaatagtatcaggagaaatacctaatgtagatgatgggtggatgcgttcagcaaaccatcatggtacatgtatacctgtgtaacaaacctgcacattgtgcacatgtgtctcagaacttaaagtgtaataataaaaaagaaaaaaaaaagaatgctgaaggcagtttcttttacttaaaataaaatgactcaagaaaatgacacataatcatataaacatatatataaacaaatttttttgagatggagttttactcttgttgtccaggctggaatgcagtggcctgatctcagctcactgcaacccctgccttccagtttcaagcaattctcctgcctcaacctcccatgtagctgagattacaggtgcctgccaccacgtctagctaattttttaaaattttagtagagatggcatttcaccatgttggccaggctggtctcgaactcctaacctcctgatctgcccacctcagcctccgaaagtgctgggattacaggcatgagccactgcatctggccaaaagagaaaagaaaaaaaaggattactttcttggatagacatgcacatacaaaaaaatgaaatttcttagcataatcataatggtgcagaaaacatttttaagtattgtctgtaatttgaaaaaaatttagaaaattattaaaattttgagagtaaaatctttgtatgcaactgaaatttatcttctaccagattaaaatatattgttatatcttttagaggttttgtgtaatttccaaggtaccacaaggtaccacaaaaaaactgtaatctgtatagatatgcaaaacaaaataagaaaaaattaaaagcatatcagtacaaaaatcaaaatgacacaaaggaagacacaaagagagaaaattagagacgaagatacaacaatcaaataaaacaataaaataacattactaagtctttctgtttcagaaaattatttaaacatgtatataaaatgagctttccaattaagagacatacttgtaataaaggaattagataattttaaaaaccaagatccaacttgcctttctataatcgagtcatcagagatctaatgataaaaaagactgataatagcaggatggatgtagatattccatgcaaatattaattaaattagagcagaagaggtcaaaataatgttactttagctgtttatttatttatttatttatttatctatttatttattttgagatggagtcttgctctgttgacaggctggagtgcagtggtgtgatctcggctcactgcaacctctgcctcccaggttcaagagattctcctgcctcagccttccaagtagctgggactacaggtgcatgccaccacagccagctaatttttgtatttttagttgagacggggtttcaccatgttggccaggatggtctccatctcttgacctcatcatctgtctgccttgtcctcccaaagtgctgggattacaggcatgagccactgcacccagcctacagtagcatatttccataccccaatttgtataataaaaacaaaacaagacagcataatagtaagagaacagagaacttgaagacaagtataaaacaatcattcctaacagaggtacagagaacactcctcaacaacatcaggatacacagccttcccaacagctcataaaacattgtccttgatagaccatctgttaggccaaaatagaagtcttaacataatttttaaaactaaatttatatggattactttctatgaccaaaatgaaatgagagcatgaaacaataatagaaaaaaactgaaaaagttataaatgtatagaaattaacacacttaggagcatgctcctgttcaaaggttgagataaatattttgaagatatccatactcttcaatgtaaactacagattcaatgggatgttctttaaaagttcacactacattttgaagaaacagaaacagcaactccaaaagtatacggaatctaatgagacaataaaatacccaataatcttcaaaaaaagaaataatgttaaaggcattacagttcctgattttaaaactcattacaaatctacaaaattaaaacaatttggtgtgagtataaaagtaaaaatgtagactaataaaaaccaatgcagcacatatataaaatttaacatatatagtcatatgaagaattatttacatactcataataattgcagcattgttacaaatttttagtagaggccaggtttcgccatgttgcccacgctggtctcctaggctcaagtgacccacccatcgctgccttccaaactgctgggattatacgtgtgagccacctcacccggcccaatttattttctttttttaaggttttttttctgaaaattttatgatattttggatgggaatgtattgccctgttttgtatacattgtaatctttaattgatatttggacattttttaaaaagctagctgtcacgatcttttatcatgtagctttgtcctggtatagtctgaaaacaattgtctttgctagagattctgggagtctttcgaacatgttcttagtatgtgtcttgtctgaaatttggtgtttttttttttagttaaagaagtttatttgtctttcttcttaatagtcttcacttgctacacctgttccctgtctgtggcactgcagcctctctgctgctgttacatttacctctggtctctgcagacccgaactgtcattccaaagtataccaccatttcattcagcactttgtcactttgtgacctccatctctgccaccatgaccactttgttcatgggcctattgggcaatgacggggtggctggggaaagacgctgagtgatgtcaacaaaacaggtcatcctatccacttgattattaaaaatctcctctgctgaggtcacccattggtgagcactcacatgggatacaaatatcttcacagtttttgaccactcaggaggttcattcacatacctcttccccaaatttctttgtcaccaatttttcaatcatgcttcttccaagtacctggcaatccagccaaacaattggctaaagcccatgattcagtatgtaatcacacatctggccatttctccttccatgcaaagtgcacaaccaggtgcactgctcaaagttctgcccactgggaagatttcccttcaccactgtctttcagggatgtcctagaaaggaactgtagtgccgcagctgtgtccactttcaggtggtgcctgcttattatacagaatcatctgtaaacgaggccatagtcttttcttcctctgtcaaatgatcacagggaactcccccttaggtcatcagtgcaggctgggggagagaaggcaggatggcagaagtggagaccatgggcatttgagccactttctcatttgtgccttcagaaactgctcaagcccaatcacatatatactacctccatttgatgatggaatgctgttttgcatgacctactttatggttagatgggtcagaaagcacccagttcatgataggcagttcaggtcgcatggtgacttgacaacccatagtcaaaagttcagtttttaccaaagcccagtaataggccaagagttgtctctcaaaaggagagtagttatctgcagaaaatggcagggctttgttacaaaatcctacaggctggccaggcacagtgtctcattcctgtaatcccagcactttgggaggccgaggcaggcagatcacctggggtcaggagtttgagaccagtctggccaacatggagaaaccccatctttactaaaaatatgaaaattagccaggcatggtatggtggtgggtgcctgtaatcccaactactcaggaggctgaggcaggagaattgcttgaacctgggaagtggatgttgcagtgagacaagataatgccattgcactccagcctagatgacaagagcaagactccatcaaaaaaaaaaaaaaagaaagaaagaaagaaagaaagaaagaacaaaattctagaggcctctgctgtgattcacctaagggggcctgccaaaggctacaaatagcatccttattttacactgacaactcaagatccattggatctcctgggtaatatggcccaagtggcagagcagcttgcacagcagcctggacctgttgcagagccttctccttttctggaccacactcagaactggcagctttttgggtcactcaataaatgggccagagtaacacacccaaatgaggaataggttgcctccaaaacccaaataggcccactagacattgtgcctctttcttggttgtaggatgggccaaatgcagcaacttaccttttaccttagaaggactatcttgacaggccttggaccactggacccctggaagttttactgagctagaaggtctctaaattttagtcagacttattttccatcctctggcatgcaaacgtctcatgaataagtctggtgtgtttgctatttcttgcttactggattcaatcagcataatgtcatcaatgtaatggaccactgtggtatttgcaaaagcaaaaagtgatagaggtgtctttgaataagattatgacacaaagccagagagagcgataggatagtaaaggtatattgccggccttgccagctgaaagcaaattgcttctggtgggctttatggacaggaattgagaaaagggcatttgctaagtgaatgtctgcataccaggtaccaggagatgtggtaatttgctcaagcaatgaaactacatctggtacagcagctgcaattggagttaccacttgattaacctcatgataatccactgtcattctccaaaatccatctgtctcctgccaaatgagttgaacgggatggggtgggaatcacagcctctgcgtctttcaagtccttgatgctggcactaatctctgcaacccctccacggatgcaatattggttttgatttactatattcctaggtagaggcagctctaatggcttccatttggcttttcccaccctaatagccctcaccctactactcagagagccaatgtaggagttctgccatctgctaagtatgtctatgccaattttgcattctggaactgggtaaatgaccacagaatgagtcttgggacccactggatcaaccatgttggacctgagctaaatttctattaagtacctgacctccataagcttctactttaactggaggaccacagtgatgttttgggtcccctggaatcaatgtcagctcagagccagtgtttaggagtccccaaaatgtccaatcatttccctttccccagtgcacaataaccctcataaaaggccagagatatccttggggaaagatgagagaaagattcactacataaattgtcagtagtgtagtggggtttttcctcaagggaatccggcctcccctttattcaaggggttctgggtctgtaaactggctcaagtctggaaattgattgaggggccatgattctctgtttttatgtttcaaattagtcttttgtccattcaacctagaatttttctgcttgcataaattaagtaggaatgcagtaggtttcctatcaattttacttctaagaacaccgtgatgaatcagccaatgccagaactctacacaagtcagactattctgattgccattttgcctctgctgtccattacagtagctatgcccaccttgcctttgatggttggcccctgccaccatgggatccaattattcccactgtatttaaattttgtagttgagtgaccggggttcccactgttagatccgacatgcagagaagagcaattataaggttcttcaaagattcaggtgctgccttcacaaatctattttgcaaggcaatggtcaagggtatatcttctggaccttccctgctagaattagtaggtctaaagtgactaatccactccagtatcccaatctccctaagccttttgattcctccctctacattaaaccaagggatatcaggcatttccaggtccctcacagtgggccatcttttaatctatatttcagctaaccgagcaaataaactattaaaaccttttttaattccccaagctgcaacattaaatgcagtgttcctacttagttggcccaaataaacaaattcagccttgttcaactctatgttccttccaccattatcccacacccttaatattcatccccaagcctgttctccagatttctgtttatataaattagaaaactcaagcagttctttttgagtgtagtgtacctcctcatggggcacactctcaacctcacctctaggggtctgctgggactttagtctacttatatgcctagaagcaaacaggggtgttgagggtggctcctgaaaagaatcaacattattttgcctgacaactgcctcaggggaggccatcagtgttgcctcaggcagtgcagagtttatctcagacaaaggtggaaaggctaatggcagcacggatcagaaaggggatgttgccactactggggatggggaagctctttcttctaacaaaaaaggctcatcagagtttacaaactcagagcccctagcttcatcagggtcctcccacacgtccccattccaagtggcagggtcccattcttttccaatcaatgcgctcactctaacagtagacacctggcgaggctgtgcatacaccttttgttgcaggtcagccactagcataataagagtttgtgtctgtttttgcacaatttcagctctttctctaccagagatgagactctcacacagggcaatcttagcagatttgaggctcagtaactgcttctgaagccaaaagatagaatccctgagttcatcattttctatcatcactttgttcactgaacttatgacaaccagcttcattatgttccttggttctccacatatggtcaaacctccgcctcccagttcaagcaattctctgcctcagactcctgagtagctgggattacaggcacccaccaccacacctggctaatttttgtatttttagtagagagggggtttcaccatcttgaccaggctggtcttgaactcctgacctcgtgatccacccacctcgccccccccaaagtgctgggtttacaggtgtgagccactatgcccagctggtcaaaggtattatgtatagagtcactaaactccttgcctctcatgaatgataaatcaggagtgtcaaatgcatttattttacataactctctaaacagttcatcccaaagactatcagtgttttccatactattagaagtagatccttaacatttttgggtctaatcatattaagcagccaattccagaaaccccagaatcaaaaaaggaacttcatccttaatattctgttcctctagaaccactcctggtacaaaaatctgtattagtcagggttctctagagggacagaactaatggaatatatatatccctgtgtgagatatgtatgtgtatgtgcatatatatatatatatatatatatatatatatatatatatataaagtatataaaggggagtttattaagtattaactcacagaatcactagacccacaataggcattctgcaggctgagaatcaaggagagccactccgagttccaaaactaaagaacttggagtctgatgttcaagggcaggaagaatccagcacaggagaaagatgtaggctgagaggctagaccagtcactcttttcacatttttctgcctgcttacattctagccactctggcatctgattagattgcgcccatccagattaagtgtgtgtctgccttttccagccaactgactcagttgttaatctcctttggcaacaccctcacagagacacccagatttaatactttgtatccttcaatccagcctagttgacactcagtattaaccatcacacctagttaagagagtcaacatctctccatttggctgagtccaggtgaaacagtcatcaccatttttctaagctgaatccagaaatgagtcagcattccatcagtgggcagattcacatatcagtcacaattccaactgtgaatttttttggtgtgtgagatttagaacctcaccagtgggctctgtttatatgtgaaggtaacaatactaactgttagctttgtctgcatattgaagtcacaatctcacctgcgtgtggggccccgtgataaaactttgcattgccagagggctttatgtaatttccataagtgtcataatcttctgtgactctcatacaggtagaagacccaggaccctaccagtttactcaagcctagctataatagtcaacatatattttattggctggatccaggtatgagagttatcaatgtgcctgtgagctaactttataaataggtcaacatcacacctgtggctggatctacatatgacattccagctgtggactgtgtccatgtacaagattcaagaccttaccagaagtctctgtccatgtgtgagggtgacactcaacttttggcaggatgagcatacaagagtcacaatctcacctgtgtgctgggtgcagttatatgtcaaaatcccacctgtggaaaagaaacaagctaagagagtcacatattttaagttctaggctaaagatatgttacaatatgccttgtgggcaaggctcaggaaagagagttacatcacctgagtgatgtgactggtgatatgtcacaatgccttctatgggcatggctcaggcaggagttttacattatttttgtgttggccctatgatatgtcacaatccccctccatttgcgtgacttagagaaaatagaagagtcacagcacctaaattatgaccacagaggtatatcacaatacctcctgtgggcagagcctaagatagagggtcacatcacctgcaatctgggctcagtacaatgtttcaatctcccctgaggccagagcccaggcagaagaggagaattatatcacctaagtgcttgggcctgtggtatgtcacagttctttttttttttttttttttttgctggggggtaggcagaatgcaggcaaagtatttcacaatacctactgtgggcagggcccaggcagtacagtcacatcacagaggtgctgggctcagtgacatctcacagtgactttgtggacagggcccaggctgaaaataagagtcataagacctaagtgctgagcccagtgaaatttcacaatagcctctgtgggtagggctcaagcaagagagtcacatcacaatcttttctgagagctgggcccaggcagggaagtaaaatcactcaggtgctaggcaaaagtatatgtcacagtcatacttgtgggaagatctagggctaagattcacaattccacacatgtcccagcttcaggtaaaagcgtcaacacctcctgtgagttgcatccaagtacctgagtcacagtatcaatgatgaactggatccatgcatgagagtcccaattccacctgtagactgtgtgttgtgttggccctatgatatgtcacaatccacctccatttgcataacctagagaaaatagaagagtcgcagagccttctgtgactcgtattagagtcaaagccttctagttgtgttgaatcctggtcttagagtcaccatccacctgtagacaaaatccacataaaacaattacaatcccaactttcgactgtgtccaggtgtgagattcagaagctcaacagttttctgtatccatgcaggagggtgacaatttttactaggcgctggaagtgcatatgagaattaaaatctcagcttgttctgggtcctcttatgacactctctgtaccacccaagggctttacattgattgggtgagagtcacaatcccctgtgagatattaccactggtataaattcatgatcttgcctgttgccctaagtttgggtatgagagtcaacatctctcctattgtctgggtccaggtatgaaagtaattgctgtgcctcttagttgggttttatgagtcaccctcccacctgtggctggatccacacatgacattaaaaattccaactgtggactgcatctgtaagtgaacctgcaggttctgtccatgtgtgtgggtgacaattcttactctttgctgggtgtgcatttgagagtcacaatctcaaattttgctgagttatgtaatgacactttctgtacaacccgagggcattatacaatattagtgagcgtggtaatcctctgtgacatttatacaagtagaaaacccaaaaccttacctgttgccctaagcctaggtacaagcagcaacatatcttctattggtgggtttattgggcaagtgaattgggttcagaaattttccaccatccaactggtgtaataggttcatatgtgagactcaggccctcaccagtaagctcggcctatgtgtgagggtggcaattcaaactgttggctaggtgtgtataggagagtctcaatgtcacctgtgtactcagtcttgtaatgacactctgtattgcccaaaagctttatactatatgtgtgagtgtcataatcttctactacctgcctacaagtaaaagacttagaccccaaagcctagctaccagagtcaacatctctcttattggctgggcccatgtttgacagtcatcaccattcctgtgagctgaatccagaaatgagtcaccatcccacttctggcaaggtatacatatgacagtcacaattccagctgttgactgcattcactcatgagactcaggacctcaacagcagtctttgtccatgtgttatagtgacaatagtaactattgtctgggattgcatacaagaataaaaatctcatctgtgtgcttgaccacgttatatttcacaattttacctgtgggaaaggctaataaatgagagtaacatcaccataattcttcacctggaatatgtctcaatctcccctgtgggcaaggcccaggctggagaatcagatcacttgcatgcagggcccagtgacatattatattttctctaggcacagcccaggcaggagagtcacaacatttgggtgttgggctcagagatatgtcataatccctttttgggtcatgtctcctgcaacagaggagaggcacattgtgtagaaaattggtccagggatttgtcacaatgtcccctttgggtggtgcacaggcaggtgaggagagtcacatcacccagataatggaactagcaatatgtcacaatgcccccgatggaagggcaaagacaagaaagtcacataacctaggtaagaaaacctgacatatgtcacaattcatgctatgagtagggatcatggaaaagaggagagtcacataacctaggggctgcacccagatatatgtcataatcactgcagtgggcagggcccaggcatgcgaatcacatcacataaatgctgggcttagtgatatgtcacaatccccactgtgtacatgtcccagaatgaagtaaagagtcacatcatctacttgttgggaccaaagatatgtatcaatgacacctgtgggcagggaccaggcagaagagccacagcacctgtgtgctggaccctgtgataagttactatttatctgttggcatggcccagtcagaagaggcaaatcaaaccacctgggtgctgggcccagtgatatgtcacagtgtcttccataggcaaagcccaggtaacagaggagactcacatcaaacagttgatgggcccagagatatttcacaatgctccctgtgagcagggtccaggcaggaggctcacatcacctttgtgctgggccactatcttttgtgtgagcagaacataggaaaatgataagcattggctgggtgcggtgtctcatgcctgtaatcccagcactttcggaggctgaggagggtggatcacctgagatcaggagtttgagaccagcctgaccaacaaggtgaagccccatctctactaaaaatacaaaatactccaagtgtggtggcaggcacctgtagtcccagctattcaggaggctgagacagaagaattacttgaacccaggagcagaggttgcagtgaccggagattgtgctactgcactccagcctgggtgatggagcaagactccatctcaaaaaaaaaaaaaaaaaaagagagaaccgtcacatcatctgagtgctgagcccagatatgtctcaatctccctgtgagcagaatccattcaggagagtcaacatacatgggtgatgggcacagagatatttcataatgtccgctgtaggaagggcacaggcagaagtgtagcatcacttgagtattggacagtgcaatatgtcaaaacagccaatgtggtcagggcacaggcagaaatcacataacctgggtgcagggcctgacagtgcatcacaatgttctctatgggcagagccaaggcaggagaataggtcacatcagctaagtgcttggccaagtgatacgtcataatccctcctgggggctggaccaaggctgggaagtcagattgctcagattctgggcagaaagatatgtcagaatcacaccagcaggaagatcctgaaatgaaattaacaatctcacacatgtcccagtttcaggtttgggagtcaacaccttttgtaggtttggtttaagtacctgagtcacaatttcaacaatgggctggatttgtacacaaaagacccaatccctcctgaagactgtgtccccttaatgaagccacagcctcacagctgtggggaatcttggtctgagagtaaccaaccagcctatggatcagatccacatataagagttatttcttcaacttcccactgcctctgagtgggagattcagagcctcaacagtgggttgtgttcatgtggaaggatgacaatctttactattggctacctgtgcataagagtgtcacaatattacctgtgtgctgggccctatgaggacagtctctctactattcaagggctttatatgctattcacaagagtcagaatttgctctgagacctccatgctggtatgaacccatgattgtactcatggccctaagcccatgtatgagagtcaacatctctttaattgacttggtccagagaggagattactctgctgcctatgagatggttttagaaatgagtcaccatctcagttgtggtcagatgtttacatatgacagtcacaattccaactgtaagctgcatccatgtatgaagttcaagaactcaccagtactctgtgtccttgtgtgaatgcaataatcctaataattggtggggtgtgcacacaaggtaaacagtctcacctgtgtgttgggcctgtgatgacactctctgtatcacctgagggctttatacagtatgtgagggagtgaaaataatctatgaccttcctacaaaaaggagactcaggatcttacccatttctctaagcttagctacaagagacagtatctctcctggtgactggtatgagagtcactattgcacctgtcagccaggccaagatgtatgtaacaatcccatttgtcagtagagaatgagcaggatgatcacatcacccgagagctgggaaagggttatgtcacagtcatttttgaggccagggaccagggataaaagaaacatcaccttagtgctaggccaagggctatgttccactgttttctgtgggcaaggtgcaggcaaaacaaactcatcaccttgttgctgggcccagtgatatgtcacaattttccctgtgggcaaagtggaggctaaaaacaagggtaatatctcttaggttatgatgcagagatacatcacaaggcctcctgtgggcaggccacaggtagaaatcgccaatttcctaggtgttggagcccatgatatgtcaaaatacacaatgtatgcagggcccaggcagaagagaagagtcacataacttaggtgctgagcctagcaatacatcccaatttcttcttggacggagcccacacacttattacccaggtgttgggtctagctatatgtcaaaatattccctgaagggagagatcagggaggagtgtaacctcacctaggtgagaagatcagagatgttgccgattctgtgtaagtctcaggaataagagaagagtcaggtatcctagaaactcggctacattatatgttgcaattacccaagtgggcaggaatctcatgagaagagggtcacatcatgtagctgctgagctaaacgatgcatcacaattcccactgtgtattggtcccagaaagaagaggagagtctcatcatctaggtgatgggcctggaaatctggcatatgcatcctgtgggcaagcaacaggcagaagtatctcagcatgtctgtggtgggcttggtagtaagttactctcccttctatgggcatgacccaggcagaagaagtcacatcacctaggtgctgggcccagagatatatcacaatctcttttgtgggaaaagacaaggtaaaagaagagactcacatcaaatagttgatgggtctagagatatgttacaatctttctgtgggcagagtctaggcaggagactcagtcactgtagtcctgggcacagcactatgtaaaaatgctttattttggaagagccaaggcagaagaatatcacctgtctgttagcctagcaatgtcacaacatcccctgcaaaccaaaccttgaaagaagagtagagtaacctcagctaggtgctggtcccaattatttgtcaaaatccttcttttgagcagaaattggtagaagaggattatcaaaacacaaagttgattggtgcatagatatgtcacagaaaacctagtaggcagggccaggccagagagttacatcacctgggtatcagactcagctacatgtcaaaatggcccatatgggcagggcacaggcaggagagtcacataacctgaatgtggtgccaagtgatatgtgacagtgctgcctgtgggcagcatgaaggcagaagagactcacatcacctgggtgcaaggccaagcaatatgtcacaatgctcccttttggcaatgctaaggcaggagcatgcagctacatcacctaattgctgctttcaatgaaattttataatttcagctctgggctgggcccagggagtagagttaaatcagtcacatgacaggcagaatctatgtcacaatcacacctgcaggaatgtccaggtatgagattaacaatcccatatgtatctaggttcgaggtgtaagattcaatagctcatgtatgttgggcctacgtaaagagtcacaatctagatggtagactaatctgtccatgagacccttaattcctcgtgtggactgtatctccttaatgaagtcacagcctcagagttgtgttgaatctgagagtcacaaacccacctgtgaatgagatccaggtatgatagtcaattttctaacttttgactgcctccaagtctgagattcagaagctcaatcattggctgttttcatgagacagaatgacaatctttactgttgactgggtgtgcatatgagtggcacagtctcacctgtgtgctgggctctgttggaactctttctgcaccacctgaggactttgtagagtgtgcataaaagtcacagtctgctctgagacctttctgctagtatagacccatgattatatctttgaccctaagttcaggtataagcatagttgtcagggtccagattagagagtcctcactctctagtcggcagggtctagattggagaatcttcacctgcctatgcactgcatttattaatgacaatttattaattgtggccaaatgttaatatatgacagtaacaaatcgaactttgaactgggtccacctgtgagattcaggagcttaccagttggcttttgccatgtgtgagggtgacaatcctaacagttggcagtttctgcactttagaaacaatctcacctgtctgctaagctctgtgaagacactctttgtgccactcaaaaggtttatgaaacacaccaaagattggtaattctttttttttttttttttttttttgagaggaagtctcatctcactctgtcacccaggctggagtgcaatgacatggtcttggctcactgcaacctctgcctccaggtttaagtgattctcctgcctcagcctcttgagtagctaggactacaggtgcatgctaccacacatggctaatttttatattttcagtagagacagagtttcactatgttggccaggctggtctccaactcctgacctcgtgatccacccaccttggcctcccaaagtgctgggattacaggcatgagccacactgcccagtcagattggtaattctttatgacattcatacaaagaggaggcccaagatgttacttttttccctaagctacaatacaagagacactatctcccctattagctgattccaggtatgggaatcatcatagcacctatgagttggaccaggatatttgtcacaatcccaagtataagtagaaaatgagcagaagagtcgcatcacctgggtgctgtatgagggatgtcacaacatttcctgggagcagggcaaggcagaaaggtcacataacctgggggctgagcccagtgatatttcacaatgctccctgtgggaaaagacctgccagaaaagacacatcacctggttactgggcccagcgatatgtcacaatcttctctatgtgcaggatgcaggcagaaaaagtgtcacatcactttggtgatagaggcagacatatgtcacaaggccacctatggacagggcttattcagtagcctctgacccaatcctgtaggtgttgggtccagtgacatgtcacaataccaaaaatattcatggctcagcaaaagaaaagatttacatcacctaggtgctggatccagtgatatgtcacaatcctcttctttggcatggcacaggaagaagtagagagtcacaccacctaggtgttggaccaagccatatgtcacaatacacaataaatgcagggcctatgcaaaagaggagagtcagatctcttaggtgctggaaacagtggtacatcacaatttctcctctgtcagagccacatcacctaggtgcttggtccagtaatatgtcaaaattcccttgagaggtgagcccaggcaagagagtcacatcatttcggtgagaaccccacagatgtgtcactattttccctgtgaatagcgctgaggaagaaaaggatagtcacatcatttaaatgatgggcccagagatagattacaatggctcctgggtacaaaaaccaggcagaataattacatcacctgtgtgctgggcccagtgataagtcactttcccttgtgtgggcatggcttcagcaggagagaagagtcacatcaccaaggttctggttccagagatatgtcacaatctctcctattgacaaaacatgggtaggagaggagagtcaaatgaagcagctgatggaaccagagatatgtcacaatgtccccccgcccctcatagggagagtacaagcaggtacctcccaattctttaggtattgtggtcagggacatgtcacaatacttaaaaaatgcagaacccaggcaataaaacagagtcacatcacctaggtgctaggttcagtgatacgacacaattcctaattcaagagggctcagggaaataaaaagagtcacataaccaaggtgataaaggtaaagatatgtcataatactcctgtgggcagagtccattcaggagagtcacattaccttgatgttggacccagccatatatcacaatgcacagcatatccagggctcaagcagggaagaaaaatcacatcgtctagttgctgggtttgatgatatgtcacaatcacttgtttttgcagaacccagacagaaaagaagagtcacatctcctagttcatggatgcagagataagccaaaaggctccttgtgggcaggacccaggcacaaggctctcatgccctaggtgtttgtctcagccatacgtcacattaccaaatatatgcagggcccaggcaaacaaggtgagtcataacaccttggtactaagtttaatgatatgttacaatccccacttttggcagggccaggacgcacacacacacacacacacaaacaaaggcacatcacataggtgattaaaaaaaaaagatatgtcataatatccctgtaagcagggctcatgcataagagtctcatcacctaggttttagacccagagatttgtcacaatacacaatttatgcaagactcagacacaagaggaaagtcacgtaacctaggtgctgggtccagtgatacattagaatctctccttgggtagagtccaagcagtagaaaagagttacattacctgggtacttgctccaggaatatgtcacaatacctcctgaggaaagagtccagaaaggggagtcacatcacctaattgaggggcccaaagatatatttcccagtgctccttgcaggtagagctggggataatcaaaagagccacataacccaggggctgagcccagctatatgtcacaactaccctaggtgcaagtctctggtatgagagaagagtcacattacataggtactgggccaagtaatatgtcacaatctccactgtaggaaggtctcaggaaaagagaagagtcacattatctgggtgatgagcacaggaacgtatcacaattaccctagacagaagcgttacatcacctgtgtgtgaggtccagtgataagccactcttccttttgtgcacacggtccaaacaaaagatgaaagtcacatcacctaggtgctgggcttccagaattgtctcaatccctcctatggtcaaagccaatttaagaaacaagaattacattagctgctctgcctatggagcagccattttttttgtttctttgtttctttacttctctaataaacttgctttcattttactgcatgggctcaccctgacttcttggggtctggattaaaagcccttttcagtaacagctttctggcaaactataaagggactatactgaggagaaaactgaaccaaaggaagtaaactgcagcaccaattagccaacttggggtaactagtggagtacattttaccagggtaaaaaatgggattgggttagaggcccaacatagaagagttacagtctctcctaagaaatactgggttaaagacctctcttaataaaaagcttgaggcccaagttaggaaggttcaagtcctttctaagatttagggggttggccgggcacggtggctcacgtctataatcccagcactttgggagactgaggcaggtggataacctgaggtcagaagttccagaccagcctggtcaatatatagtgcaatcctgtctctactaaaaataatttaaaaaaagcctggcgtggaagagacacctgtaatcccagctactcccaaggctgaggcaggagaattgcttgaacccaggagacggaggttacagtgagccaagattgtgccattgcactccagcctgggcgacagagcaagatgaggctctgtctctaaataaataaataaataagtaaataaataaagtacagctgtcctaggactttttgtcacccacagacaattgttgtcttgattcgatcctcttcaagaggtgatttatggtccgctatggaactttgccaggtatttttaaatgcaggtttctgataactttggagactgcaacattagaacagaggaaaaattttcaggactctcatggagagctgaaatgttaatgaatatcaagcagaaaaggagtttatggcataaactgaaataatagaagacaaaaataatagtttttggcttttttcttaaaatgctgcaaatcctttttttttgtttttcagagtcaaaatatttatagctatttacagtttttaacaactggggaaggtatacttctgtaaaaaaaatttggagcatacttgtttttcgctacctgatttctccagaatgtagaaacctattggtatttttaatttatggaaatatagctatttgcatatgtgccataagcatgttttcttttgcaacagggcacaattggagacactggtaatttcaccagactttggctggaatggggtgctttccttgaagaaatcatactgaatttgtagagtcaatataagccttatgggaaacctggcctcctgctatgtctacacagtccctgtgcagggttcctgacccatggtaagtaaggaatgtcatttcttttttttttttttagacagagtttccttctatcacccagcctggggtacaatggtgtgatttcaactcactgcaacctctgcttcccaggttcaagtgatcctcctgcctcagctgcctgagtaactgagactacaggtgcatgctaccacaaccagctaatattagtatttcatgtaaagatgggttttcaccacgttgagcaggctggtctcgaactcctgacctcaggtgatcaactcaccttggcctcccacagtgctgggattacaagtgtgagccaccatgcctggccaggaatgtctctttctgacagaatcaggagcctgaagttatcttgggaccccaagaagagagaaactcacccaactcataggtatttgatggtacaaacccatggctgggcttggcttttaaaaagtcttttctgatattcctttaatggaacatagttacatcaaagccaatttttaaaacatatgtgaaaaataattatttatgctgcactttatacaaataatcaggccaagtataagactaaagctttttatgcaagtaaatcagttttaccatgatttgtctttagtagaaatggaagacaggagagagaaaaaaattatgtttcaagaactatagtacacccgttattagacactagtctcatttgttgtttttgagtattttccctgctatttagactaattctgcttattcctgtgaacacaccagtgatctctgactgcagctctaaagaaacaagagagatgggtaatataaaaatccagatcaggggccaggcacggtggctcatgcctgtaatcccagcactttcggaggccgaggtgggtggatcacgaggtcaggagttcgagaccagcctggccaacatggtgaaactctgtctctactaaaaatacaaaaataagctgggagtggtggcacatgcctgtaatcccagctactcaggaggctaaggcaggagaattgcttgaacccggcaggcggagttgcagtgagtcgagattgtgctactgcactccagccttgccaacagagtgagactccatctcaataaataaataaataaatccggatcactattctaactgtgaacacatattggaatcaggtagtaaacccatatcagctttgttccaacatctgcccttatttagtttacttgggacaattttacttattttgcttgactgttgtggattgtattgttgttgtgctctttgtgtagaaatgcaggataagcttgctgaatgtttttcttaaatagaacacttaattttgcagataccatcttttgttaagaactccagagttataaatggcccttgtcatactaatgctttctcatctggccaggcatggtggttcacgcctgtaatcctagtactttgggaggccaagagaggtggatctcctgaggtcaggagttcaagaccagcttggccaacatggtgaaaccccgtctctacaaaattagccaggcatggtggcaggtacctgtaatcccagcttctcaagaggctgaggtgagagaatcgcttgaacccaggaggctgaagctgcagtgagccgagatcgcaccactgcattccagcctaggcaacagagtgaaactgtctcaaaaaaaaaaaaaaatgaaaaagaaaaagaagagtcaaatcacctaggtgctgggcccagagatacttcatagcccctcactaggcacagccgaagcagtagaaaaattcacataacctaggtgctgggtacagcagtatgtcccaataccccttgaaagaagggtgagccagagagtaacatcaccgttgagggaccaaaaggtatgttacaatgccttctgtaggcagaggacagggtggaggattacatcaccttcatgttggactcagcaatatgtcacaatggcccatgtgggcagaacacaggcaggagagtcacataacctaagtgcgaggagccacaatatgtcaaagttgtctctatgggcagaaccaagacattgactaagtgctgggtgcagcaagatgtcactacccagtctgtgggctgagcctaggcaggagcgtaaaagttctcaagtgctaggctgaggtatatgtcacaatcacagctgcaggaagatccagagatgagattaaccatcctgcacacatcttggttctaggtatgagaggcaccacctcctgtatgttgggtctaagtgtataacccacaatctcaacagtttagagaatccatccataagagcctcaatacctcctacagactgtgtccctttactggagtcaaagcctcacagatatgctggatcttggtcttagtgtcaccaacccacctgtgaaccgaatccatgtatgaatcaattttccatcttcaactttctttgcatgtgagattcagaacctcaagagtgagctgtgttcatgtggaagaatgacaatatttactgccagctgggtatacatatatgagtgtcataatctcacctctataccatgctctgttatgacaccctttgtatcacaaaggtctcagagcacattaaagtcacacacacacacattaaagtcacagtatgctctgagacctttgtgcatctacagactcatgatcctacctgtggccccaaacccaggaataagagtcaacatctctccattgaatacatccaggtagaaaggatctaacttgccagaattagaaatgagtcaccatcccaactgtagctggatgttcacatatgacagtcacaatccaaactgtgggctgtgtcaatgtgtgaaattcaggacctctccaatgggctctgtccatctgtgagggcgacagtcttaacagttggtggtatgtgcatataagaaacacagtctcacctgtttagtgtgccctgtaatgacactttctgtaccattcaagggctttatataatatgtaaaagaatagtagtgctttatgaccttaatacatagagaagactcataatctctctcattttcctaagtctagttatgggagacagtatctcttctattggctggtttgaggtataagagcaattaatgaacctgtgagctggataaaatatatatcacaatcttacctgtcggtaggaagtgagcagcagattcacatcatgtaggttttcggcaaagatatgtcacaatctttcctgaggtcagaaaccacgcagaagtcatctcacctaggtgctcagccacagatatattacaatcccctcttaaagcagagtacaggcagcagagtcatttcacctgggtgctgagcccagtgatatgtcaaaatgctctctgtgggcacagccttggcaggagagacacatcatctggtgactgggtccagcaatacattacaacattttctgtgggcaggatgcaggcaaaagaagagagtcacatctcttaggtgatggaggaagagacatcttacaaggcccctcatgggcagggcccaggctggagcctcccatcctaaaggaatgatgcccagctatatataacaatacccaagatatgcagtgcccagggaaaacagaagagtagcatcacttaagtgctgggtttagtgatgtgtcaaaatcccccattttgtcagggcccaagcagaagagaagagtcatatcacctaggtgatgaatgaacagatatgttttaatacctctgtaggcagggcccaaacagatttgcatcacaaaagtgtttggtccaggcaggagaggaaagtcacgtcacctaggtgttaagcccagtgacatgtcacaatctcttcttgggcagagaccacgaagcagaggaaagtcacttcccctgggttctagagccagcaaaatgtcacaatgccctctgtgaaaagtgctaaggcaaaagtatagtctcacaccacctagatgctgggttcagtgatatgacacaatttcacctgtaggacctaggcagaagggtcaaatcactcagttgctgggaagagctgtatgatacaatcacacatgcaagatggtctaagaatgagattaatgatcccatacatgatctggttcaaggtacgagagtcaatacctactgtatgttgtgtctaattacacgagtcaccatctcaaaggtgaactggatctgtgtattaaatcctcaatccctcccatgaactgtgttccctcagtggagtcagaggctcacaggtgtgctgaatcttggtctgagagtcaccaacccacccgttgacgagatccatgtatgtgattcaatttttcaactttcagctgcctttggatgtgaggttcagagcctcaaaagtgggctgggttcatgtgggaaaatgacaatctttactattgtcagggtgcgcacaggagtgtcataatctcacctgtgtgcttggtccttttaggacactctctgtactatcctagggctttatatggtttgcatgagagccacaatccagcttgagattttcatgctggtataaacctatgattgtatctgtgtccctaggcccagttatgagagtcaacatctctccaattttctgggttcagataggacagccctcactttcttatgagctgcatttaaaaatgttttcctatcccaaatctggatggatggtcacatatgacagtcacaattccaactgtggactgcatccatgtgtgggattcacaattgcggtctgtccatctgtgagggtcacaattttaacaggtgcttggttgtccatacatgcaagtcaatctcatctgtgtgctgggctctgtgatgacacactgtgtacaatccaaaggctttataccataggtgagagtgtggtaatcccctctgaccttcataaaaataggaaacccagaatcttatccattttcctaagcctagctatgagagacagcatatcaactgttgtctggtttaagatatgagagtcgtcatctcacctgcgacatgggacatgtaacctgtgagtaggtagtgagcaggagagtcacatcaactgggtgcttggccagagatttgtacaatattccctgatggaagggaccaggcaggagaggaacatcacctgggtgctgagcccagtggcatgtcacaatgctccctgtgggcaaggttcaggcaaaagaaacacatcatctggtcagtaggcccagcaatatgttacaatcttctctataagcagggtgcaggtagaagaggacagtcacatctcacaggtaatagatgcagagatatgtcacaaggccttctgtgagcagggcccatgcttatgcctcccatcccctatgtgttgagtccagtgatatgatacaatacccaaatatgcagggcccaggcaaaataggaatgtcacctcaactaggttctgggtccagtgaattgctacaatctccttttttctttggcagtgcccaggcagaagagaagaggcaaataacctaggggatgaatgaaaaaatattttatagtacccctgtggacagagcccatacagaagagtcatattaacgagctgatggacccagatatatgtcacaatacatgacgtaggattggcccaaacatgagagtcacatcatctacatgctgggactagtgatacatcacaatctctctttgaacagagagtaagcagtggaggagagtcacatcacctatgcgctgcgtttagcaatgtgtcacaataccctctgaggggagagcccaggcagtattgttacatcacctgggtgctaggtcagggatatgtcacaatcttccctgaatgtggggaccagacaggtgagtcacatcacctgggtgctcagccagtgatatgttacaatgtccttctaaaagcagggcacagtcggtataatcacattacctagtttctggaagcagcaatatgtcacagtgctccccggtttgctaggcccaggctggagagacacatgacctggttgttgcacccagtgttatgtcacaatcttacctgaaggcagggtgcaggcagaggagagacacatcccctaggtgatagatgcaaagaaatatcaaaaagccctctgtagtcagggccaaggcaaaagtctctcatctcctaggttttggacccagcaatatgtcacaataacaaaattatgcaaggcccaggtaaaagaggagagtcacaccattaagtgctctgtccagtgataagtcactatccttctttttgtcaggacccgggcagaagaggggagtcacatcacctagataactaacaacatgatatgtgataatgcccctgtgggcagggcccatgcaggaaactcacatgacctagacattgtacccagccatgtcacaatagcaacgtatgtacagcccagggaggagaggagcatcacataacctaggcccagtgatacatcacaatttcttattgggcagagcccaagcagtagagaagagtcatatcacctagtttctgggtgtgacaacataaaacactaccccctgagacgaggatcaggcaagagagtcacatcacctaggtgatgggctcagatatgttataacgtccccaggtgagcagggctaaggaagaagaggaaagtcacataaactagggtcagggccaagctatatgtcacagtcactccagtggggatcacccaggcatgagaagagaatcacatcacataggagctgggcccagcaatatgtagcaatctccactgtgaacaagtctgaaaataagaaggttcacatcaactaggtgatgaactcagaaatatgtgaaaatgatttctgtcggcaaagaccaggcagaaaaattacatcatgtgtgctgggcttagtgataagtcattatcccttctgtgggcatggtccaagcagaagaaaaaagccacattacctaggtgctgggcccagagtttggcacaatatcttctatggagaaagctggccgggtgcagtggctcacacaccagtaatcccagcactttgggaggtcgaggcaggtggatcatgaggtcaggagtttgagaccagcctggccaacatggtgaaactccgtctctactaaaaatacaaaaattagccaggcatagtggcgggcgcctgtaatcccagctactcaggaggctgaggcaggagaatcatttgaaactggaaggcggagcttgcagtgaaccgaggtagcaccactgcactccagcctgggtgaaagagcaagactttcaaaagaaaaaaaaaaaagaaaaaaagaaaaaagaaagcctaggcaagaaagaagtcatcaaatagttcataggcccagaggtacatcgcaatgccccttgttaatggggtccaggtagaagactcacatcaacctgctagtgggatcagcaatatgtcacaacgctttttgagtgcagggccaaggcaaaagaggaacatcaccttgaagttgggcccagtgatatgtcacaatgttccccgtgaacaaaacctagaaagaagagtcacatcatctaggtgctggggctagcaatctctttcaatactccctgtaagcaggaacccagcaggaaaagagagtcacatcacctgtgtgatgggcacagagatatgtcacaatactttctgtaggcaggacctaggcaagagagttatatgacatggacattagacccaacaatatgtcataatggcccatgtgggcaaggcacaggcaggagagtcacataacctggttatggttcccctatgttagctgcagtaatatgtcacagtgctccctgtggggagcaccaaggcaggagaataaatttacatcacctagatcctgggttcagcgatgtgttacaatccaatctgtgggctgagcccaggcaggagagtgaaaaaactcaggtgctggacagaggcgtatgtcacaatcacagctgcaagaaggtccataaatgagattaaccatcctggaaccatgttatggttccaggtatgagaattaacacctcctttatgttgcatttatgttcaggactcacaatctcaactgtggacttgatctgtgtatgagaccttccatccatcctctagactgtgtctccttagtggactcacggtttctcaagtctcaggggtgctgaatcttggtctgagagttaccagcttacttgtacactggattcaaggatgaaagtcaatttttcaacttttgaaactttcattggttttgagattcagaatctcaacagtgggctgtgctcctgtggaaggatgacagttattactgtcagctgggtctgcatgtgagtgtcacaatctcacctgtgtgctgagatctgttaggacataatctgtcctatttgagggctttatactttatgcataagaattgctggccaggcacagtggctcaagcctgtagtctcagtactttgggagggtgaggcaggtgaatcacctcagtttgtgagttcaagaccagcctgaccaacatggagaaaccccatctctactaaaaatacaaaattagctgggtgtggtggcacatgcctgtaatcccagttacttaggatgaggcaggagaatcacttgaacccaggatgcagatgttgtggtgaactgagattgcaccattgcactccagcctgggaaaaaacagcgaaactccatctcaaaaaaaaaaaaaaaaagttacaatctggtctgagaactttatgctggtatggacccatgatcatacctgtggctctaagctcagctatgagagccaacatgtctctagttggctgagtctagataagagatttcttaccgcctatgagctgcaggaagctcatagccattgagccatatgtgaatatctagccatttcaactctggctggatattcacatatgacagtcacaatttcaaatgtggactgaatccacttatgagattaagaatctcagcagtgagcattgtctatgttggggcgggggttccaatcctaagtgttgctgtgttgtgcatatgagaaacacaacctcaactgtgtgccaggctctgtgatgacactctctgtaccatccaagaactttacacaatatgcaagtgaatgccaattctgcaaggtatttataaaaagaagacccagaaactcgtctgtttgccaaagccctgcaaagagacacagactctctgctactggctggttaaatgtattgcacctctgagctaaaccaaggtaaatgtgacaataccatcagggatatgtcacaatcttgcatgaggccagagatcaggcagtggagttgcatctcctgggtgttggacccagcaacatatcacagtgctttctgtgggttgagcccaggcaggagagacacatcacctagttgctaggcccagtactatgtcacaatcttctctatgggaagggtgcaggaaggggaaccacatagtctaggtgatggacgaagagatatttcacaaggactcatgtgagcagggcccaggcagtactctcccattccttagctgttgagcccagcagtatctcacaatattcaaaatatgtggggcccaggtaaaagaaaaatatcacattacctagctattggcccagcaatacaccacaaatttctccctgggcagaacctaagcagtagaggagtgtcacatcccctagtttctgggtccagcaatatgtcacagagcatggcccaggcaaaaaagtaacattacttaggtgaagagatgtcacaatgtcttctgtgggtagggctaagagagaagaaaagtgtcacataacctaggtggtggtgccagcgatatgtcacaatcaccccaaaagttctggaccaagtgatatgtcacaatcttctctgtgtacagtttacaggaagaaaaagggagtcacataatctaggtgatgggcttagaaacatgtcaatatgacccctgtgggcagggaccacacagaataatcacctcacctgtgtgctagatacaccgataaggtatcttggttctgtgggcttgatcgtgtgctaagaagagggtcacatcacctaggttttggtcccagagatatgtcacaattttgtctatggtcaaagccgaggtaagagaggagagtcacatgaaatagttgatgaagtcagaaatatgtatcaatgccctctgagaacagggcccaggcaggagactcacatcaccttgctgctgggcccagcaatatgtcacaatgtcttctgaaagtacgacgaagccaacaggttaatgtcatctcggtgttgggcaaggtaaaatgtcaacatctcccttgcaggcagaacttagaaagatgagaaaagtcacatcagctaggtgatggacccagcaacaggtagcaatcttcccctttgagcagagagcacacaggaaaacagagtcacatcacctgggtgatgggtgcagagatgcatcaccatgtccgaggtaggcatggctgaggctgaagagttacatcacatcggtgttaaactcagcagtatgtcacagtagcccatgtgggcagagaacaagtaggagaatgacataagctgggtttgtggcccaggaatatgtcatggtgtcccctgtgggcagtaccagaaaaggagagacttacatcacttggatgtaaggcccagtgatatgtcacaatgccccctgtaggcagcatcaaggcaggagtatggagtcacatcacctatgtgctgggttcagcaatgtgtcacaattgcaactatggactgggcccaggcaggagagtcaaattacttaagtactgagcagaggcatatgtcacaatcacacctgcagggtggtttagaaattagattaacaatttcacttatgtcccaggtctaaatttgagtcaacacctcctgtatgttgggtctaagtacaagagtcacaatctcaatggtgcacttgatttgtttgtgagagtctcaatttctcctgcagactgaaggcttactggagccacagacttacaggtgtgttgaatagatgtctgagcgtcaccaactcacctttgaaccaaatccacatgtgagtcaattttccaacttttgactgttttcacaaggaaaatttgggacctcaagagtgggctgtgatcatgtggaaaggtgacaatttttgctgttggctgggtgtaaatgtgagcctcacaatcttacctgtgtactaggctctgctaagactctctcagtaccatctgagagctttctacagtattaacgagtgttgcaaaccactctgtgaccttcatgatggtaaggactcgtgattgtacctgtggttctaagcccaggtatgagagtcaacatctctataattggctggttccagataaaagagttctcacctgctgtggagctaggttaaaaatgagtcaccatctcaagtgcagccagatgttcaacgatgacagttacaatttcaactgtagactgcatcctcatgtgagattcaagaccttaccagtaggctctgtgcatgtgtcaggtgacaatcctaatagatgatgcggtgtgcatacaagaaatgcaatgtcacctgtgtgctgggccctgtgatgacactctctgtaccacctgaagggtttatatgacatgcaagagagtggtaatccactatgaccttcatacaaggaggagactgagaatcttacatatttccctaagcctagctttgaaagacagtatgttccctatttgttgatttgatatatgagagttatcatctcacctgtgagctgaacaaatcccacctgtgcatagacagtgagcaagagagtcacatcattttggtgctaggccagagatatatcaaaatcttttctcatggcagaaactaggaagaagagtcacgtcacctgggtgcttggccagggatatgttacattcctgttctgaaaggagggcacaggcagcagagtcacagaatgtgggtgctgtgcccagtgatatgtcacaacgctccctgtgaacaggacccaggaaaagaaaacacatcaacctgttgctgggccaaatgttatgtcacaatctttcctgttggcaggatgcaggcagcagaagagagtcacatctcctaggtgatgaatgcagagatatgtcatgaggcttttgagaatggtagggctaacaccctgtttacagggaacagacaggtgcctcccatcttctaggtgtttggtctagtcatatgtcacactactcaaaatatgtggggcctctgcaacatacaagagtcacgttaactatgtgctaggtccagggatatgtcatcatcccacattttggcagggacatgacagagaagaaggacatatcacctaaaccataaatgtaaaaatatatcatagccaggcacagtggcttatgcctgtaattccagcactttgggaggctgaggtgggcggatcacttgaggccaggagctcaagaccagcctggcttacatggcaaaaccccatctctactaaaaatacaaaaaaattagctgagcatggtggtacacgcctgtaatcccagctattccggaggctgaggcacgagaatcacttcaatccaggaggcccgatgattaggttcaaggccaaatagcaaaatatgtttgcatttaatctattttctctctatataaacactgcaggtcaagagtatgcacagatatgaagacttagagttttcttctcctccggacctatcatcctttgctccctttctgatctctggaaggaaggtgggccaaaggtggccagcagttgtctacttgtggttaatttattcctgctgccctctgctctttctatggccgccatcttttccatcctccaaactgaagagagatgttgttaggaagaggcccttccttcacactggcagaataaatttattcaggccctttacccacccaacatcagagctgcacttcacgtgtggctcctgagtgcctggaatgtggctgggtctacactgtgatgtgctggaaaggcaaaaaacagacttagtagcctgtgtgcggtggctcacgcctgtaatcccagcactttgggaggccgaggcaggtggatcacttgaggtcgggagttccagaccagcctgaccaacatggagaaaccccgtctctactaaaaatacaaaaattagccgggcatggtggcagatgcctgtaatcccagctactcaggaggccgaggcaggagactcacttgaacccaggaggcagagaacacactttgtgccattgcactccagcctgggcaacaaaagcgaaactccatctcaaaaaaaaataaaaaaaaaaaaacaaaaaaaacaaaaaaaaacagacttagttccaatgatatagttctaactatatacatgctacattaataattacacattgctcatatagtaatattttggatatattgggttactgaaattgttacaatcagtttgacctatttcttctttctttttaaagtttggctactagaaaatttaaaattcacatttggctcacattctatttcagaagattgcctcctttttttttttttttttttgacggagcttagtttcgcttttggtgcccaggctggagttcaaagcgatctcggctcactgcaactcctgcctcccgggttcacctgtctcggcctccccagtagctgggattacaggcacccgccaccatgccccgctaatttttgtatttttagtagagacggagtttcatcgtattggtcaggctggtctccaactcctgacctcaggtgatccgccggcctcggcctcccaaagtgctgggattacaggcgtgagccaccgcacccggccatgattgcctccttcttaaaatctcaggctgcctgatcaaaaaaccagaagccaggaaggtcaggaaagctgaaattttaaaatagttgttattagattatttttgtttgtgaataacaatatagtgtatttttttcttttctttttttttttgagacagagtctcactctgtggcccaggctggagtgcagtggcgcgatctcggcttactgcaatctccgcctcctgggttcaagcgattctcctgcctcagcctccggagtagctgggactacaggcgtgagccaccgcgcccggccatattatgtattatgtataaacgcatatgaccttacacacaaggttaaatgcaaatacctttgggttgggcctggctcagctcagggaggaaaacctgcctgaaaaggctggagcttaggctttcactctttcttcattcagccgagcatctgatcacgtctcctgtcactcagggcctaaaggggcgaggccttaaacgttatccagtcagggacgctgggctggaaaccgtccaatcagacacgaagctggagcggacagggtggcttccgggtttggcgggtactttgtctctcgctctagcccgagctgcaggtctcgtcttccctggtctgtgtcctcttctcctaggggcccagcctctgtggccctgtgacctgcaggtattgggagatccccagctaagacgccaggtcctcctggaagcctagaaatggtgagagtgctgggtccgacatcctgggagaggggaagggggtggttggaacctgtgggaagtcgctgtggcgggactcaggcctccttgcagtcagccctaccatctgcgcccgagttttccttggccagctcggcctcggtccccctcagccataagatggcggctgcgctgacagccgggaccccgggcgtcctgtctcttccctgcgcagtgactgtgccctggcctggatccctctctcggcagctctgcacccgcagcgccgagtctccccaggttgtgcagggaccacaggagagtcgtcaggggagaatcctgactcggggtgcggggttcatgaatgggaagagctttggtctgtggggttctgagtctctcttttctcttattaaaaatatacagaagtcaccgcaaaaatattaaagaatttaattaaagagtgattcaaaaatccgggcgcggtggcacacgcctgtaatcccagcactttgggaggccgaggcaggcggatcacgaggtcaggagattgagaccattctggccaatatggtgaaaccccgcctctactaaaaatacaaaaattagcgggcgtggtggcatgtgcctataatcccagctactcaggaggctgaggcaggagaatcgcttgaaccaggaagtcagaggttgcagtgagccgagatggcgccactgcactccagcctgaagacagagcgagactccgtctcaaaaaaaaaaaaaaaaaaaaaaaaaaaattgtaaagtacccagctatggtttgtcatttgtcgtccatagcaggggcttgaagagaagactttaataacatgagataaagaaaaccaaattcagtaattggttagatgcagttacatagtttgttaatttgtactatcaaggtggacatttccttgttatgtaatcagaggttaaatggtagtgtatagttggctacgcctcaattttgtttcccccaatttagtaatttataaaaacatgcgtttgaggccggcgctgtggctcacgcttgtaatccgagcactttgggaggcccaggcgggcggatcacttgaggtcgggagttcgagaccagccttaccaacatggagaaactccgcctctactaacaatacaaaattagcggggcgtggtagtgcatgcctgtaatcccagctactccggaggctgaggcaggagaatcgcttgaacccaggaggtggaggttgcagtgagccgagattgtgccattgcactccagcctgggcaacaagagtgaaactccatctcaaaaaaaacaaaacaaaacaaaaaccatgcatttgagttaaatttctttaaagtagaaatccagggactagagccacctcagtctagttgcctgccacttaattattttcacaagccacaggggactaattttccgctgatttgtttttctttttttttttttttaagaaggagtttcactctgtcacccaggctggagtgcaggggcgagatttctgctcattgcaacctccgcctcccaggttcaagctattctcctgtctcatcctccggagtagctgggattacaggcacccaccaccacacctggctagttattgtatttttagtagagatgaggtttcatgtgggctaggctggtctcgaactcctaacctcaggtgatccgcctgccttggcctcccaaagtgctgggattacaggagtgagccgcgtccggccttttccgctgaattttttacatgtgtcccaagcagagtctcaagttttaccctcctcccccttcatcatttcttcagcctaactctggattgcaaaaatagtaaataataaaatactaaattttcagtttcttctgacattcccaaatgccagttttccctaattcacattatcaattattcatcctttagtttacattttttataccatattttaatcattttttgacaaagcattggatggcactttaaaaagatttgttttctgtttgtaaatactttccatgggaagaaagcaaagtataattccctgacactgtagtgtaaaaaaaattttgttcctctttgcttttatcttgtataggcacagagatcttatcagaatgtttttgggtcaaagtttccctttggaagctgtgaggtgagatgtcttcacccaccctttagttttgttcttggtcttgggcttcagtatttcctggggataaaccaagatacccaccatggctatatctgctagagtatctagtggatatcagctactgggtcttttttttttttttttttttcttcttatagcacaacctgagttatggagtgtagcctattaagaaagaaggtggctgccccagggctgagaggagtctcctgttgtatttctttttcgaagatattaagattgtcttcacccaactcagcttccatttcttagagacacattgctgttaagccaatcagatgctggtaaaaaacacagaaataatttctgccccctggattctctaagtgggcagagaaatagtgaaataaaaatagtgaaacatttgtgaaagaaaaaatagtattttttggtttctttgagacagagtcttgctctgttgccgaggctggagtgcagtgacaccatcttggctcactgcaacctatgccacctaggttcaaggattctcctgcctcagcctcccaagtagctgggattaaaggtgcccaccccaacgtttggctaatttttgtgtttttagtagatacagggtttcgccatgttggccaggctggtcttgaacacctgacctctggtgatccactcacctcggactcccaaagtgctggaattacaggcgtgagccaccgtgcctggccaaaaaacagtatttcaaaagacaaaaatttaaaaaaagaaaactgaacccagttagatggtataagagcttacaaaataaaatgatcctgggccactcagtggggcatagtgcagtttctcctgagagagtggttattgagcacttatgagagcaggatggggtgggagaatctctcaagcgattagatggccttacttgacatatgagtcagacacatttgtttcttaatcagcattgctactccctcggtttgtcaccttgaaaagaattgttttcggccgggcgcggtggctcacgcctgtaatcccagcactttgggaggccaaggcgggaggatcattaggtcaggagatcgagaccacggtgaaaccccgtctctactaaaaaatacaaaaaaattagccgggcgatgtagcaggcgcctgtagtcccagctactcgggaggctgaggcaggagaatggcgtgaacccgggaggcggagcttgcagtgagccgagatcgcaccactgcactccagcctgggcgacagagcgagactccgtctcaaaaaaaaaaaaaaaaagaaaagaattgttttcacttatcttgacctccgattttttaagtataagttgcattttattagtagggctttaaaggtaagaaaatatttacaaagggacgggggagcactgtctcgtgcctgtaatcttagcactttgggaggccgaggtgggtggatcacctgaactcaggagtttgagactaacctgggcaacacggtgaaactccgtgaaagcccgccactatgctggctaatttttgtatttttagtagagatgggttttcaccatgttgtccaggctggtctggaactcctgacctcaagtaatccgcctgcctcagcatctcaaaggtctgggattacaggcatgagccaccatacctagccctcatttacctatttcttttccagagtgaatttagaaatttttttttttttttttgagacggagtctccctctcacccaggctggagtgcagtggcacaatcttggctcactgcaagctccgcctcccaggttcacacccttctcctgcctcggcctcccgagtagctgggactacaggcacccgctaccatgtccggctaatttttttttgtatttttagtagagacggggtttcaccatgttagccaggatggtctcaatctcctgacctcgtgatccgcccacctcggcctcccaaaatgctgggattacaggtgtaagccaccgcgcccggccgaatttagaaattttttcaagtgtgttttattatggctgggtggtttcaaacgcaattccaaggcttagcttttagaatgctaccaaggaaaagaatagaaaaaaatctctgtattttggctgtagaaaatgaatacatttccacaagaaaatatggtagataattgatgagttacatggattcataaaagcatcagtttctttttttgcagggaaaacttgtgatagtgaatatctctgttctatattctgttattttgatttctgagtttaatgttaaattttatgagattaaacttgttacctcctagaagtgttcacatattactaattatttacaacatgatttttaatgaaactaatacaataatacatttattctctgaaaggaatactttaacttttcttattgggtatgaaatataagcaccttaattttttttccttatatgagtactatgtttgataattttgctagattttttaaacacttagtttcaaaaaccaagtgagtaactctgtcatagaaattaaaacttgagcccagtgactccaagctaaggctaatattgagcctgcaaaaaaggttattaaaggcccagctaattctttctggggagccgcccctgcagatgtcccagccatggaagaagcctttatcctgagagaagctacagagccctggaaagccggggatccacaggcagatgcagttaaggttaaaatagaaggggtctcagaaggtcttactgaagatgaagttgttattgttctgagatagtttctagactttgtaaaatataagcaaagttagatttatgtttaaaaaaaattccacaggagtattgcaacaggaggaagcactaacaataatatctttaaggactgcaaagcttaggctgacagggactgactttcataaggaggagcaaacagattaaaaagaaagtgtgagggaaatgggaaattgaggatgaaataactagatttgagatcttttgagatggagtctcactgtgtcgcccaggctggagtgcaatggtgtgatctcagctcactgcaacctctgcttcctgggttcaagcgattctcctgcctcagcctcctgaatagctgggattacaggcaccagccatcatgtctggctaaattttttgtatttttgtagagacgggggtttcaccatgttggccaggctggtcttgaactcctgacctcaggtgatccacccacctcggcctcccaaagtgctgggattacaggcataagccaccgcgcctagccaaattcagctgatttttatatgagaaaaagaagaaaatgtgcagagtctgtgtctggctatgtgatgggcaaaaaaaagagccccatctaagttataatggaaagggtgtttctttccatgaactgttcctggagcacacaaaggatggagaattttattaatcacaactatttacctggattacctatgtgcttcatctttccccacctattttttttttgtcctatacatttattccattttgctttttctgggttgtatcttttatgattaactggtcaacataactatgttgttttgcttgttagtggctctatcaaatcattgaacttgagggaggttatgggagtccttgatttttaaacagtagctcaggagcatagatgggttcattgggtttgttcctgacatctgcagtaaagagaatactgtggtactgagccctgaatcagggtctgtgctgaatgggtggtgtcagaattcaaattttagacaatgagttgatgttggagaatcttggtattcagcaaactctacagatttggtgccagaagaaagataccacagaggcctggcctgaaatgaaactctgggaggctctgcttttctgtctgtcatagtgcccattgttttgtgattctaggtctcctcccagggtgagagaggactgaaaacttaaaggaaagaagctcggatagcagattccctttttccacagctgtcagcacaggatttctacccagtcacaaagacacccactagacattgaggtgtctacaccactcccagggctagacaccaccctcaggaatttcaccacagcatttttatcctaatgtttttttttgccaaaaacccacaagtgtctacaagtctcctggcatatcctcacccctagacactgaatctgcagcagcaacctgttttctccaccaacctagggttctggaccacctgttcgtaatctcatctgcctgcatgaacccagaaataaattagagtcacacctgggccactatctgtagcacaaaccagtcctatcacctacattgcactctctcaaactaactcatggatttttttccttttaacttttattttttgttcctgagtacacatgcaggtttgttatataggtaaaattgtgtcatgggggtttggtgtgcagattatattgtcactgagatactaaactttgcaccaaacaggtattttttctgatcttttttgtcctcccatcatccaccatcaacttgccctcagtatctattgttctctttgtgtctatgcattcttatcatttagctcttacttataaatggtaacatgtatttatttattattattttttgagactctgggattacatgcgcctgccaccacaccagctaatttttgtatttttggagggacggggtttcaccatgttggccaggctggtctcgaactcctgacctgaggtgatccacccacctcggcctcccaaagtgctgggattactgtctctacattagttttctaagaatactggtctctagctccatccacgttgctacaaaggacatgattttgtttcttttcttttttttttttttttaatggccacgtagtattccatgatgcttatgtaccatattttgtttttattaaatcttttattttattttatttatatttgaagaaagggtcttactctttcacccaggctgaagtggagtggtgtgatctaggttcaatgaagcctcaatctcctgagcttaagcaatcctcctacctcagccccccaagtagctgggactatagtcacatgccaccacacccactaatttttttctttttctattttttgtagacatgaggttttgccatattgctcaggctgctgtcaaactcctgagctctggcaatccaccagctttggcctcccaaagtgttggattagaggcatgagtcaccatacttgcccataccatattttctttatccagtctaccatggataggcatttaggttgattccatgtctttgccattgtgaatagtgctgcaatgaacatgcatgtgcatgtgtcatgatggaataatttatatttctttgggtatgtacccaattaagaggttgctaggtcaaatggaaatttgtttttacttacatgagacatcactacattgcttttcacaatggttgaactaattcacactcccaccagcagtgtataagcattccttttacaaccttatcagcatctgtgattttttttaactttcgtataatatccattcagatttgtgtgagatgatgcctcattgtggtttttgtttgcatttctctaatgattagtgatgagcatttttttatatccttgttaaccacatgtatgtctgttttgaaaagtatctgttgatgtcttttgcctactttttcttttttttttttttttccgagatggagtcttgctctgtcgtcagactggagtgcagtgggatgatctcggctctctgcaacctccgcctcccaggttcaagcaattctcctgcctcagcctcctgagtagctgggattacaggtgcccaccaccacgcccggctaatttttgtatttttagtagagatggagtttcaccatattggccaggctggtctcgaactcctgacctcagccaatctgcccgccttggctttggttgggattataggcgtgagccacagtgcctggcctaatcaatcttgagttgatttttatatatggtgtaagaaaggggtctagtttcagtcttctacatagtgctagctagttattccagcaaaatttattaaataaggaatttttctcaaattcctcttgtcagtttgtcaaagatcagatggttgtaggtgtgcagaataaattttggggctctttaatctgttgttttggtctctgagcctgtttttgtaccagtaccatgctgctttttttactgtagccctgtggtttaaagtttggtaatataaggcctccagctctgttccttttgtgtaggattgccttggctatttgggctcttttttttttgttccatatgaattttaaaatggattcttttggttctgttaagaatgtttttggtagtttgataggaatagtattagatctgtagatttctttgggcagtatgcccattttaatgatattgatcttttctatccatgagcataaaatgattttccatttgtttttcatctctgacttatttaagcaatgtttttttgttttgttttgttttttatttttgtcatagagatctttcacccctctggttagctgtatttctacataattatttttctgtggcagttgtgaatgagattttgtttttgatttggcttttagctcagatattgttgatgtacatgggtgctactggtttttgtacatttattttgtatcctgaaacttttctgcagttgtttgtcagtttaaagagcttttctgtcacgactatagtcttttctagatacagaatcatgttgtctgcacacaaagatcgtttgacaacctctcttcccatttggatgccttttttttttttctcacctgattgctgtggctaggacttccaatctatgttgaataggagtggtgagagaagacattcttgtcttgtgccattttttaaagagaaatgcttccagcttgtgtccattccattcagtatgttggctgtgggtctgtcataaataattcattattttgaagtatgtaccttcaatgcctaattggttgagggcttttaacataaacgatgttaaattttgttgaaagctttttttttttgttgcatctattgagataatcttgcagtttttgtctttcattatgtttatgtaataaatcacattgatttgtttatgatgaaccaatcttacatcccagagataaagcctacttgattatagtggattagctttttgatatgctgttggctgttggatttgattacacagtattttgctgaggattttttttttttttttgagacagagacttgctctgctgcccaggctagagtgcagtggcatggtgttgcctcactgcaacctctgcctcctgggttcaagtgattctcctgactcagcctcctgagtagctaggattgcaggcacccaccactgcgcctgcttttttttttttttttttttgagacggagtctcgctctgttgcccagtctggagtgcagtggcgaattttttttgtatttttcgtagagacggggtttcaccaaattgaccaggctggtcttgaactcttgaccttgtgatctacctgcctcggcctcccaaagtgctgggattacaggtgtgagccactgcgcccagctttgctaaggatttttacatcaatgtttgtgaaggatattggcctgaagttttctttctttctttttttttttttttgagacagagtttcctccttgttgcccaggctggagtacaatggtgcaatctcggcttaccacaacctccacctcctgggttcaagcaattctcctgcctcagcctttcaagtagctgggattacaggcatgcgccaccacacccggataattttgtatttttagtagagatggggtttctccatgttggtcaggctggtcttgaactcccgacctcaggtgagctgcccgccttggcctccaaagagctattacaggtgtgagcctccactcctggccagccactgcacccggcttacctgaagttttctttttccattttatctttgctgggttttagtatcacaatgattctgttctaatataatgagttggggaagattttcttctcattttttttggaatacttttagcggaaatggtactagctctttgttcatcttaaagatttcagctgcaaatttctctggtcctcagaactttttggatggtaggctatatattactaatccaattttggagcttgttatttgtctattcagggcttcgttttcttttgtgtggagtcttggcaggatatatttgtgttcagtcttggcaggatgtatttgtccaggactttatttattactattagatttcttgtttgtgtgcatagagatgtgcatagtagacttcagtagttatttgtatttttgtggggtcagtaataatgtccctttgtcatttctaattgtgtttatttggctcttgtttcttcattaatctagccagtagtatatcttatcaattttttttcaaagatttaactcctggatttcttgatcttttgtatagttttacatgtctaagtctccttcagttcagagctgcttttggttattttttgcattctgctagcttagaattggtttgctcttgcttctcatactttattttgtgatattaggtcactaaattaagatctttctaacatttcgatgtgagcatttagtgttataaatttccttcttaccactgccttagctgtgttgcagcaattctggtatgctgtatctttattctcagttgtttcaaacaacttcttgatttctgtcttaatttcattatttgcccaaaagtcatttaaatgcgggttgtttaattttcatataattgtatgttttcaagtggttttctttgtagttgaattatattttcaacaatctgttgtctccatgtgtggttggtataatgtagggatttttgtatttgctgagtattgttttatttctaattgtgtggtaaatgttagagtttgtttcacatggtgattagaataatgtatattatgttgtttttacatagagttctgtagatatccattaggactatttggtcaagtgtcaagtttacatactgttatctttgtttattttctgtctcaaggatctgtctaatagtttctgtggggtgttgtagtctcctactgttgtgtcagaattaaagtctcttcataggtctctaagaacttgctttattcatgtgtacccatggaatttttataacacatttctctcttctgcttttttccccataagcattatttcaagtgcacaaagtgtgcccaaggttgccccttagatgcctgaatccaatgtctgctgaaattgagatgtccaagaattcaagaacacgtccagaaaacctggctgttgtagaaaaaaatataaattagaaatgaaaagctttattcttctaccttgaaataagcacttagcatcttaaagcatttaagatgatatgtacatttatctttgttattttgaaatatacataaattatattaacagctaagtaaaccttttgtcattattttttactcaaggttgtcattagctaggacttcagattcattgctttgtttttgctttggcaaagttttttcctttcatttttagtcttttaaagtcgacagttttgtttatatcaaagcttattttaaaaacacgcaaaagtggagcacaaaaataggattaaatttagccatacagaatgataaagactaaaagatactgagtagttttttttaacagaaaactgattgtccaaggtgattatctaatattttcaggctgaagtactcacactgcaaaagaaagcagttcagtatataaactgaacagtgaagtctttagttgtactttggtttccgtttattacttcagaacaattagcatagttatgtgtagtgtttgtaggcaacctgcgtttatatactttaaaaactattttcagccaggcatggtggctcacacctgtaattccagcactttgggaggccgaggtgggcagatcacgaggtcaggagttggagaccagcctggccaacatggcgaaaccccgtttctactaaaaatacaaaaattagacgggtgtggtggcacgcgcctatagtcccagctgttccggaggctgaggcaggagaatcgcttgaacccaggaagcagaggttgcggtgagcccagaccacgccattgcactccagcctgggcgaaagaacgagactccgcctcaaaaaaaaaaaaaagtattttctacaatagtatgaatataaggccacaaaatttactttcaatgaatcagatgggccttttaatattgttatttatacttttgaaatataaagtgttttaactgaattatgataacagactttttttgttttgttttgttttttcaatggagtttcactcttgttgcccaggctggagtgcaatggcatgatctcagctcaccacaacctctgcttcccaggttcaagcgattctcctgcctcagcctttcaagtagctgggattacaagcacccaccaccatgcacagtgaatttttgtatttttagtagagatgggatttcaccatgttggtcaggctggtctcgaactcccgacctcaggtgatccacccacctcggccttccaaagtgctgggattacaggcatgaaccatggtgcccagcgattacagacatttttaaaaaattttacatttattatgactagtacattaaaattatatatacttagatatttatatctaatgttcaaaaaatttactacaaaattgttacagtagatattagtctgaaatgcttatttatctaatagggataactctaggtaagcataattttagtgtcttgtatttcactaacttggaatgctgctattacaggacaaacacaggtgacatggccatccaaaaaccgtaatagctctttagttaactatgttgcaagctcaaatatattctactatatgaacagagagggattccaattcttcatcaaaaagtgctggtggaagttgtcagatgtatttcaacatagatcccccattcaatggctaggagatgagagagcaacagagatgaaagagaaaccttatgaaattctgctgaaaatatgcacactttctttataatgctcatgtttctcatgctgagagtagctgtgcactctggatgcttagaaattcttttcaggggaatattttctggctatttcgataaatcttatgtctaatttgagtttttcttaagatgcttttaacttctttatttctctcaataaaatcttgctcatttgagagctgtttttctctcaaatgctttgggtgtctgttttagaagccttatgcgtatcccgtggtgtctttgaatgaggtgggctgtcacagggatgactcttggagtgatctctaccgagactcatactgcaaatccagcagtattttttcatgtcaccattataaattggcactgaggctgaaacacttcttccattccctttattgtgaaggtgcagttctacccaggaggcctgcaggctctcctcctgcagctcaggcttcactctctgatgtggcactggagtgctactgtggcagtttgggttcacataagatgtgagctgccagctgtgagccctgtgctgtgggctgtgcctcagtggcagatggtaggagtcaagagaggacactggtgaccaggggagggcaagcaggagtgctctagcccagtctcagggagtagagagccattattttaaaatgtaaatagccaaaatgatagcatcctaatcaaccatttttgtagaagagtgagagcctaccttcagcaggcaccaggcttaagtggcaaaactgccttttgtcatgaagatgtgataaggtttattttggcattgaatataaccatgtagcatatatggaaggccttttcaattatcaagtgaatttagaatgaattatgtatagcatggtgttgtaaatttttctacttatggactaattatgatgaacatctttctgtctttgcagtctttgagcagattgaccatgatgcacttcacattctaggttaattgtgtaataaaacagttttctttctgttctatcattgtgtttctctggggctgtagaaagtttttcttttcgttatatattccagacactgtctagaattaccagacatgatataaacacataaggtgccagccaagctttactctagaggggactttccctctcaggcttccagtcacctcacaattatgctacatagtatgtgctgtctcctaaatatgcaggaagaattgtgtatctgcctatttggtatctataggccactacagtcacttctagagaagctagaccagatttctacaaacttcacagggcagcaatcaacattttacctctttcgttgactcttgtatcttcagacctgaaactgattcacagaacatggagctcagaaacccaatcagagtaatatgtgcgcactgaatagacacgtagacatgagaatctccactttcttgtatctcctcttgctaaaatgtccacaaatatgcaggtaacacctgctgctactccacccatccagagcctaaatctgcagctccaaattctgaatgtaggtcttaagttttggaaaataaaaaaaaacgtttatctgaggaatacaagtccttttagttgtcaaacacagagagacattaaaatgagagctcaggttgggtgcagtggctcacacctgtaatcccagcactttgggaggctgaggcaggtggatcacgaggtcaggagttcaagaccagcctggccaacatggtgaaaccctgtctctgctaaaaatacaaaaattagctgggcatggtggtgggcgcctgtaatcccagctacttgggatgctgaggcagagaattgcttgaacctgggaggcgaaggttgcagtgacccgagatcgcgccactgcactccagcctgggtgacagagcgagactctatctcaaaaaaaataaaaaataaaaaataaatgagaaacacaattatgtctcccccccgcttgagctatgtattcatctcctgaaaccattcacaattgccacaagtagcatcaatttaactaataatgtgacactgaacactataacttaagctgtaaaccttactgatgtatatccaatcaatagtcaatgttatttctataaataaataagaaaggtaggtatagttgtggttatgactctagacactttgttgccttgatctctcactcccaaaatcgtttgttactaacaaacatttttgtaccatcccactctctgtccctctttttttttttttttttttgcctttacaaatccacttgtaactgctgattatcaaagtgtagattccaggcaacttgaatctttgctcccaggttacagtcctcaaagatggaacaaataaactgtctacttatatctgtgttgcctcgggtttttctttttaggcagacatattacttaggatgtgctagaacagcctctaggagaacatctctctttgattgtactccacttgctgtaacacccaagaatgcagagccagtttgatctgaccaagaatctgcacataagagctgatctctgcctgagattcacaagacagggccaggttttagattaagaaggtaatgaaaaccaacaggaggaatttctgcattgtgagatgtcaacatagacatcttaaagcccccctttgatagtgtggctctttgagcttttcaagtcttgtccagtgacctgctgcagttacatgagaggatcctggtgtaaacagaatctgatagcaacatcttaggagtgagagatcaaggctacaaagtatccagagccatgactgcaactatacctactcctaaaatgtgatactggagtagaacatttttgtccttcctcttacccaaaagctagcaaatcaggacaggtgatccaggttctggagctttaccagggcagttccattttctatttagaatcagcctaaatctcttctgtctggcttacaattgggccgtcagcacacggtcactgggaatcctctcagaatcacctaggtgtctttgagacatttgaggatttccagagcagaattgtcaggctgacgagtggttaactctgcttctgtctcagtgtaagagaaatgggtcatccttccctcattcaagaggtgtctttggttggtacccagatgacagtttcttcaattgctggtacttgggaggaaaagaagtagttctggagattcgaacagttaaactaaatgcttccatctcatatggccattagaataatagatgtagcagtcatggtccctaccatccatgaacttttagtccagactagcaactggataaacgatgaattaagcatcatatggttgatataataaatagatttgtgcaaagaaacttggggtttatttgggccgtaagtaacccaaataaaaaataaacaatattaggccgggcgtggtggcttacgcctgtaatcccagcactttgggaggccgaggtgggtggatcacgaggtcaggagttcgagaccagcctggccaacatggtgaaaccccatctctactaaaaaaaataaaaaattagctgggcgtggtggtgggcgcctgtaatcccagctacttgggaggctgaagcaggagaattgcctgaacccaggaggcggaggttgcagtgagccaagattgagtgattgagtgattgcattccagcctggacatcagggcaagactctgtcttaaaaacaaaaaaacaatattgttgtgacttctgatgtcatcacctgaagggatgtttatggacagaagaattgttattatttttatttcttttattttgctaagaatacttatttatcttctaataaaattattctagatatccttaagatatttgtttaaatggattattagtatatattaggaaattgacagggcagtagctaaaaaagattaaagttacatgaactctgggatttaagtttttcttaggtaagcttaggaaacagaactggaagtaccccagtggcacagagaacaaattctacataggctccactccctgctccagttctgttcagttcctacttgggggctttatttagtcctgtccccaccctggagtcttgcctcagataattgatttaataagatcagagttttggttggtgaagcctgctgtctttctagaagtggtgctcacagttttctgaaatccaaaagcagataaatgggaataataaagtatgtattttagggtctttttaaattttttattaaaaccagtgcttgcagagacattccatttagcaacttgttttctaatcttacaaatcagtagttgctccacaagtcacaaaaaattaaatataaacacaataaaaattcctctaaactacattaaatttttcctttatccctctcatctatctatttagctttattctatacattttataaaaaattaatgacagagaaactataaaaattaaaatgctgtgccctttatctaaatcctgggaattattaaacacttagtaccaattcccaagggtgttatgaagattatgtcacataatgtgttattcccagcacagtgctccgtaacatcctcttgagcacatagagcacaatgtttaataaacattccatcagtacacttgtacatgttatttaaacgcagacttattcagacatggctgttttctgtttcctctgtatactctacagagccagcaaagaatatgatactttaggatggagagtggttgtcttcatttgccctagaagtatttgtgttgtgacaagagtgctgagtataagggactctgtgctgtgcctgctttctctaactaatgctgatcatgagcccaggggagcaacatcaacattgacaggggacttgtttaaaacattcattttggacccttttcaaacctgcagcatcatattacatagagtgggcccaaaattactaagtgatttgtaagctcattaaagcttgagattaaatgcttagctaagtggttataagcccagacctctaattaggattacatggccaatttgcagaaaaatccttacttcagcttttcctacaggttttgtttattgttttaggtggaaacatatatgttgttttggttaagtacctcgtataattccaatgtgaggccagaatcaacaatgaagggttcaaggcattcatgagagttaaggtagaaacctttgcactaaagggtggtcacagggcatgttctgtttgggtttgggagagacaaggcagtgtggcccatattaccattactgtagcagaaattgctggtgtctgtggcagaggagggcatctgaggacagaaaagaagaaacttatatttttattttcatagagaagctcattgttcctgaatctctactagtataaaggacagaaatggatggaatgtttctgcaggtcttggtcctgccagtgggtgtggtggtagcaggtaaatgggtggtgctgacacctttaaaggcatattctcgagatgcaggtgtaatttgtgcagaaaatttcatctgagcaagaattccagaggagaaggaggaaaaaatggcttttttttttcaactaaacatgtctcatatcaagagctgtgtccactctgccttctgaaatgccatgcatttttacgtgcaaacctttacttctctacttgtttttcctccctaatgagtttgttttaactactttaaaaaattcttgtaatagtcaagggtctctgaaaaatatgttttttcccatataccagagccttctacatcatggctccttctatgccacgcagaattttcttcatggatttataatctactgtattaaaaatgttccctttgtgtctgggaaggtgtgaatactcaagattcctattggaagaagaaaggggttcttaaaaaagatggaaaacttgtaatgttgaggttccatctgtgttcttcattaactctatagagagcaggattaaggaagtgtttatttaaggaggatggcatttattacccagaaagtcctgaaaaaaaatgaggaaatacttgctctctagggtgctaaagaaagactacttaaaatcactattaaaaattacagaacatgagagatatctgtgtcttgaacttggtataaaactgatggttctttatggttgaattcggactacgatttacttctgggagaaaatgtcacagtggtgatgctgtgtccttcttttgtgcatcagcacatcataaaaatttgtcctagtgcaagtaacattaatgattcacttggttaaggaggtctacaaatttttttactagaaagctagttatttttcttttcattataaattatttttatgcagcggatgtgcataaaccatcacattttatctggtagctgcccctctttcttaggttttatttgcatatatctgtctttggcaagtaaaaactgtcatctttttctttttacagtccagcaatactaggaaaaacacaggctcttttacttagtggatgtttgacaaaatattcttcttgggccaaaaacattggcattactggtgaacttgttagaaatatagaaactcaaaacaaaacaaaaaaaattcagaaacagactttctataagtcagaaccagttctctactctctcatttgaccttgagacattaaaaattctgccctggctgcttggtaaatgtgtatgggggtgtgttttttagagtcagagaatacattagagaatatttctgtgttaaaaaaatattttcttggataattttggtcactccaataaggcagaacctgttctctctgctctttaattacaccttgagtgacattaaaaattctgtccctgaccacttggtaaatatatgtgtgtctgtgtttgtgtgtttttcagggaccactgacaattagggatgtgactgtagaattctctctggaggagtggcattgcctggacactgcacagcagaatttatatagggatgtgatgttagagaactacagaaacctggtcttcctgggtgaggataacttcagtactcaattcctaatatactccaaaggctttattttttatttatttttttttttgtagaatgttttttggtaatttggtaatttttgataattatgttttgcataaatgagtttcatatccctgttttcaagaaaatcataaggatttgtcagtgtagaaaaaaaaatttcttcaagaggtttcaccttgaactgaactttccacattgctgagctgatctgtatccctcactctagaatagtggtaattccagaaatttagtggtgtaaaatattgttgcccacaccttaaaatctaattgctaccaccaatttttttattcagtagtactgggtagtgaattaagaatctacaaatatacagtattttctaaatatttagaaatttctgttataaattagtattttggcataaatgtattagaatattatattacattctctttattgagcacattactaagttggtaattggagaatatgagcaagatgcgtgttacttatttttaaaaaacaggtattgctgtctctaagccagacctgatcacctgtctggagcaaggaaaagagccctgtaatatgaagagacatgagatggtagccaaacccccaggtaggtgagagtgaaagccagtacaacaggtgaaacagatgagagatccacaggtcaaggagaaagcaagtccttaaaatgtcatttcggaagctgtattccaagggatatagtttctggaagcctgagtttgcattttttttttctttgctctcacatagggacatttctgtcttatgcttttaaattctctaaagattctactttcctttcagtcattttccttcaagtttacagtgagagccaaagtcctcatggcatataagagactgcatagtctgactgctttttcattgtttttaggggcatacaaatatctgcataattttcaaaaattctatgttaagctatttcttaagttctctttttgcattgtgcctgacatgaatagagtagtggtttctgttccattgaattttttaatttttctgcacatttcatcctttttctttagtatatttttgaaagatagtttggaattataaaatatgatgtcattctgctttttttttcctgaagattgctttggctattcaaagcttattgtagtttcatgtaatctttagccttgtattttccgttactgtgaaaaaaacttgccactggaatttttacagggagcttattgaacctatatttattgaatctatattctttcaactcatagacatgaaacattttcaaatttatttttgtcttctctatttcttttcctagctatcttatatctttcagtgtaaagagtttttatctccttggtcaaatttgttctcagaaatttatttatttatttatttattttttgagatggaggttcactcttcttgcccagactgaagtgcaatggtgcagtctcagctcaccgtaaactcctcctcccgggttcaagcgattctcttgcctcagcctttcaagtagcagggattacaggcactcgccaccatgcctggctaatttttgtatttttagtagacatggggtttcaccatgttggccaggctggtctcgaactcctgacctcagatgatccgcccttgtcagccccccaaagtgttgggtttacaggcgtgagcaccgcgcccggccagaaatttattattttaatgctattgtaaataagatttttttttgtctattttaccagatagtttgttttaagtgtatggaaccataacttgtattttaattttatattttgctaatttacggagtttatttattaacttaggttttaatgcgctgcttatggttttctataaaaaagatgtaatctacaaacagcaaatttttacttatttgtcttcagtttcaatggctttttgaaaactgttttgactaattattctgccatatacttcagtgctatgttaaaatagaagcattgacaaggtgcacaatataattttgcatttggtgtctgtgaatttgaaggagcaaacacctcttcaagtttctataaactagtttcaggaggtaaagatcttcttccattgggcccccagggtgatgggattccctctgggtttgtgatggagaggggttgtagcttggtcacaagattgctgggtctgcactagggtccacctttagttggcttgttacaaagggcttggatagttgtaattcccatattatttttggacagattggatatccttcaagactttgctctgtagggcagacactagggcaggtttttgcagtagggtctgtatataatgtaccttaaatcgggatgtaaatgagtatggcttttgctgagtaccacagaggatttcctcgggtcacactgtgttggtttctaggtaaagagaactggccataaactgtggcccaggaagctggaactgagactttgaactgcttcaggcaccacattaaaagccagggtctgcaggcctgcctgcatggctgtaaacgggtgtcttcctccaggcctgtgaaaggacagaacctctcccagactgcggctgaaaggattttgaaataattacagagtaaattcagaattctcagtgggaccaagtagcgttggccatttcctgtcctgtagccaagaccaggggtcctgtagtttgccaccaaaatgagagcctgctttctgaagagaacacccctcaatctttggctttagcagaatttcacaacttcatccctggactttaaagatctcttaaaggcatttattttggagatggggtcttgctacataacccaggctggtcttgaaatcttggcctgaagcaattctccaaccttaatataccatgtagctgtcattacaggtttgagccatgaggcctggtactctcataaaggtatttttgtcagggatggccaacaaattttcttgctgtggaggaatagacaaatagggcaccttttatttctctatcttattaatgtcaccctttctataagtttttaatttctaatttctatttcaaatgtgcctgtaattttagattcagacatttaggagcaataagctagaatttacatgttatgtttgaagtaaattaggtaattagtaggcattccatatttactaatatagttacttacaaatttaagtttgctacaggcaaaaaggaattatatattttcacccattttctctagcctatatctaaacaataacataatttattcattaagtatttgttttatataatagactccaaccatattctgctatatatatattaaattatatatacaaaataaataataaatacatatattaattacatatatattttagcaatgtaaggctatttcttgcttctaaagttggattacagcagtttcattttgtgaaagaatagcatacaattaaaacataaaaattatctctagtttattttaaatgcttatttattgtttctcattaaaatcttctgtttatgattattctgcattatctctaaaattttactgccacacagtgcctgtcaatgattcgaaatacctgccttccatgagtacacagttacagtcaaatactgtagttatctagacaattttttttaatggtacatcagtgttgcataccacattatatgagtaaacattttacttattgttgttttgcagttccatattagtgtgtttttttcaatgtaggtttcttttgttttttgagacggagtctcgctctgtcacccaggctggagtgcagtggcatgatttcagctcactgcaacctccgcctcccgggttcacgccattctcctgcctcagcctcccgagtagctgggactacaggcgcccgccaccatgcccggctaatttttggtatttttagtagagtcagggtttcaccgtgttagccaggatggtctcgatcacctgacctcatgatccgcctgccttggcctcccaatatgctgggattataggtatgagccaccgcacctgtcctaaaatttaccatctttaatctgtttaagtgtacatttcaggcctaggcatggtggtggctcacatctataataccaggattttgggagaccaagacagaaggattgcttgagcccaaaatgttgagaccagcctgggcagcatataaagtccccctctctccacacacaaaaaatgttttaatagccaggcatgggggtatgcacctgtggtcctagctatttgggagattgagtggggaggattacttgagcctgggagtttgaggctgcagtgagccatagttgtgccactgcaatccagcttgggtgacagagtaagatcctgtttcaaaaaaatggtatacatttcaggcatgttaagtacattcacattgttatacaagagacttccagaaattttccatcttgtaaaactaaaactcaatacccattaaataacaacaacccattttaccctctctccagccctcaacaaacaccgtttctctttgtgtttttatgagtgtgatgacttaaaatatctcatattagtggaattatatagtattcattattttgttactggcttatttcaggtgacataatattctcagtttatcttcaaatgtgacaagattttatgaggctgaataatatttcattgtatttaggtattacatttttcaatgtgtttccaaattaagacatttgggttgcttcagccttttgacttttgtgaatactaatacaataaacatgactgttcaaatacgtcttccaggtcctgtgttgcatattatagatatagattcataaatgagattgctgtattttatggtaattttatttttgattatttgaggtacatttataacattttaaaataatggctacgctcctgattttcaccaacaatcgacatgggtttcattttcactgcatcatcaacagatttggtgtttttttaaaaaattatagtggccattctaggccaggcacggtggctcatgcttgtaatcctagcactttgggaggccaaggtgggcggatcacaagggcaggagtttgagaccggactggccaatatggtgaaaccccgtctctactaaaaaaaaaaaaattagctgggcgtggtggcgggcgcctgtagtcccagctactcaggaggctgaagcaggagaattgcttgtacccgggaaatgaaggttgcagtgaactgagatctcgccactgcactccagcctgggcaacagagggagactccaactaaaaaaaaaaaaaaaaaaaaaattatagtggccattccaatgagtgtgaggtgattttgttttttgtgatttttatgcaattctctacaaaatagttattttgcattttcttttaaatgcattttcttatttgtgtatatttttgataagaattttgttcaattatttgaccatttctaaatcaacttattcaactgtattgtttagttttaagacttgtttatatattctgaatattaactcctatcatgtgatttgcaaatattttcacacattttttatgaggcattgtcactctattgaatattttatttgagtgcaaaaattttgaaggatagtgcagttaaatttttctgttattttctttgttgctgatgcatttaatgttgtatctaaaaaagtgttgctaagacaagcgtcatgtttttcttctatatttctaaaaaattggttaattattttttatgtctgggtattttatttaaaatatttttcatatatggttcaaggaaataatccagctttatcactgttgacacccagttttctttctttctttttttttttttttttgagacggagttttgctcttgttgcccaggctggagtgcaatggtgcaatctctgctcactgcagcctccacctcccgggttcaagtgattctcctgcctcagcctctctagtagctgggattacaggcatgtgccaccacgccctgctaattttgtatttttagtagagacggggtttctccatgttggtcaggctggtctcaaactcctgacctcaggtgatctacctgccttggcctcccaaaatgctgggattacaggcgtgagccaccaccgcacctggctggtatccagttttcaacattaatttttgaagagattatcttttctctattgtgtgctcatggcaactttgtggaagatcatttgatcttttaaaggggggttcatttcttcactcgtattctgttctttcatctgtttatgtgtctttgtttcagtaccacatcgtttttattttagcttctagtatgttttgaaattagaaagtataatgcctccttgttctttttcatgggtttctggctatagttgtaatcaaggtttaaacttttacacaagatttcttgtattggttggtctgttctcatgctactaataagaacatacccaagactgggtaatttataaagaaagaggtttaattggcacacacttccacatggctggggaggcttcacaatcatggcacaaggcaaaggaggagcaagtcatgtcttacatggtggaagacaagagggcgttagcaaaggaactcccctctataaacccatcagatctcctggaacttattcactatcacaagaacagcacaggaaagacccactttcatgatttaattacctctccctgtctctctcatgacacatgggaattgtgggagctacaattcaagatgagatttgggtggggacacagccaaaccatattatttctgttaaaaactgtgctattgagattgttataatgattgtattaaatttgttcacaactgtaggttgtattgacacctttgaaaaattaaatttttggcccctgagcaagaatatgttgaagaattttatatatttagttttatatacttttggacttgccagttttgcttttaattcctagttttattcaattgtggtcagaaaacgcacagtgtataattttggtatacttaaatgtatttattgttgtttttagacaggatcttactctgtcacctaggctggagtgcagtggcatgattttggctcactgtcacctcaacctcctgggctcaagtgatcctttcacctcagcatccctagtagctgggactatagacatgcattaccacgtctggctaatttttttattatttgtaggaacagggtctcactatgttgcccagcctggtctcaaacttctggccccaagagagcctctcactttgttcttccaaagtgttggggttataggcatgaggacttcatgctgccatgtaattctcaatgttgaatgtaagaccagtgggaggtgtttggtttgtgaggaaaaattccttgtgcatgggttggcaccatcctctttgtaatcaaaattttacattctattaattcaaaagagagctggctcattaaaagaacctggctccttcaccttacacttgctgtctgttaccatgtggtatgtccagttaccagttactcttggccttccaccatgattgtaagctttttgagaccctcaccagaagcagatgttggcacacacttcttgtacagtctgccgaactgtgagccaaatctttttttttttaaataaattatctactatcaggcttcctgtgtattcaaaataatttatacagtctataatgttttctaagttctctgttttattattgctattttatctgaattttctatttattattgaaaatgaggtcttgatgtctacaactatgttgctatgtatttcctgcttcaatttgttgatatttgctttatatattttggagccctgatattatatatacatatacatatagctagataagtattttattaaatacattaattatattatatatctatatagttggttttttttttttgagatagagtcttgctttgttgcccaggctggagtgcagtggcacgatctcagctcactgcaacctccatctcccaggttcaaacaattcttccacctcagcctcccgagttgctgggactacaaggcacgtgccaccatgctcggctaatttttgtatttttagtagagtcggggtttcaccatgttaaccagcattgtctcgaactcctgacctcgtcatccacctgcctcggcctcccaaagttctgggattaaaggcatgagccaccatgcccggtcctatatagatatctatatgtatacatatatatgttatatatacacgtatctgtaggtatacgtatatatatactcatatacatatggatagataccagttaaattgacccattttaccattatataatatcagtctttgtctcatgctagtacttaggactaccataattatgtctaccataattatgcctacccacccaattataattactatttgcatggaatatagatttttttcattctgttactttcagcctatttaactaaattctaaaatgaatctcttgtatgcagcatattgtatgctgtttttcttaagccaattaggcatttaattttttaaatataatttatttaattttttatttttgagatagattctcactctgtcagccaggctggtttgcagtggtttaatgatggctcacagcagcttcagcctcccaaactcagatgatcctctcatttcagcctctcaagcagctgggttacaagtatgtggcatcacaccctgctagtttttttgtattttttgtagagacacagttttgccgtgttgcccactctggttttgaccttctgagatcaagtgatcagcccaccttggcctcccaaagtcctgggattacatttttaaaaattaaatagtttaattaatttgtatttaaaataattgcttgaagaaatgtttctattaccagttttattgttattgttttatgtgctcttatagatatgttttttctcatttcctattttaccaccttaaattttgcttaattttatagtgacatgccttacttttctatttgtttagcatactttctataaatattatcttcataatcatcttgaaaaatgaagattacataaaacatcttaaggttaaaacaatatattttaatctcataacttcaactgaatacaaatactatacctctacatttttgttattaatattacaaattatatctaataacagatttatgcagatttatattttgtttttcatattctgtagaagaaatttagggattttatgcaccatcattataatagtaaaggattccatgtgtgtctgtatatttacatttaatagagaggtttatatttacatagtcatatgatgctgtgcgaattttatttttcagcataatggactcgtagcatttctttgtttttatatgcaaagtcaccatgttcctcaggatgttcttgaactcctggtcccaagtgatgtgactgcctgggcctcctaaaactgtaagattacaggcatgagccactgtgcctcgccaccatgtagcattttttataggacagtgctagtcgtgatgaacactctcaccttttattttggaaagtgtttatttttatctttttttgaagtaacataatttcaaatcaagtattattggtcaggtatgattttattacctcaaaatttgggaagtacttagtctttttcattttcaagtaaactctgtattactttttccctatagtcttcttccagcattttgttcatgaatatattgatcgacttgatgctgtccaataagtattacattctatgttttaaatttgttttgcaattttatatttttgtattatatattttagaacatgacatctcataccagttaattgtgttttgatttttcagtttatattataattgtgtatgacaatatttagttctgaacaatttaagacagtgtggagcaaaatcaaatatgaatcagccatacagctagtgccaatataattgtctctgtgtttgtttgcctttataaatattatccctgtgtttctttataacttgtatatttgtggtgtaggtttgttgtgaaaggttgtttaatcctgtgtagatgagtagccacaaaaattctcctaatttcaacatcctatttatttgtgaatcttccatatccggtttattcatgaatctatattatttttctgtgaaagaaatacttttggctttgaagataatttaaaaactaccgacagggtgtggtggctcacacctgtaatcccagcagtttgggagggcgacgtgggtggataaccttaggtcagcagtttgagaccagcctggccaaagtggtgaaaccccgtctctactgaaaatacaaaaaaattagccaggcatggtggtgggcgcctgtaatccagctactcaggaagccgagacaggagaattgcttgaacccaggaggtggagattgcagtgagccaagatcgcgccattgcactccagctgggtgacgagtgaaactccatctcgaaaaactaaactcataactaaatttctcttctagctactattgttcatttttacttgtcaaaaacacataataatttataataaaatattttcaaatattctggtttattttttagttatattgacattgttatgcaacataattgctgaagtgtttttatcttgcaaagctaaatctcaatacacattatacaactaccaatttttccagtattatggcacttttgaaacaccactctgttttctcttcctagtggtgtaacttctttatatatctcatacaatctctgtctgtttgtggctggcttatgtcactttgcaaaatatcatcaagatttatctgtgtagttgttagaatattttctgctttttgaaaactgagtgatgtggtccggtgtggtagctcacgcctgtaatcccagcactttgggagaccaaggtgggtggatcacctgaggtcaggagttctagaccagcctggccaacatggtgaaaccccgtctcaactaaaaatacagaaattagctgggtatggtggcaggtgccggtaatcctagctattcggggggccaaggcaggagagttgcttgaacccgggaagcagaggttgcagtgagctgagatcgcgccatcgcactccagcctgggggacaagagcaagacttcatctcaaaaaaaaaaaaaagaaaactgagtgatgttccagtatttttacatttcaaattatatctattgaataatttggtgacagaaattagcattgtttttaactattggctttccgtaacaatgctacaattattatgggtatgtaaatgactctttatatgaccatatatatgaaagtttacgtgttgcattctatttgatttgtctagttttcagcttgatactgataccaaattgttttaattctgtagctttgtaatctgttttgaaataaggaattataatgcctccaacattgtttctttttttttttgaagattgttgggtactttgttgtctcttgcaatagcactcctgagtttgttattgctattttttcaaaagtgcaatgagaaatttgaaaaacattgcattaaatctgtagattacattaaacagtataaacatctatacaatattaattattttaacttttgaaaaagagcatgcttgagtgtatcgtttaatttctatatatttgtgaaattttcagttttttccattgtttcatattcttattccattttgttcatagaaagtaatctataaaattttagggtttttttttttttttgagacaatctcactctgttgcccaggctagggtgcagtggagtgatctcggctaactaactcctgcctcccgggttcaagtgattctcgtgctttagcctgctgagtatctgagattataggcgcatgccaccaggcccagttaattttttatttttggtagagacagggtttcactatgttggccaggctggtttcaaactcctgacctcaggtgatccacccgctttggcctcccaaactgctgggattacaggcatgagtcaccgtgcctggccaaagttttagtttttttttttgttgttgttgtttgtttgttttgagacagagtcctgctctgttgccaggctggagttcagtggcgcgatttctgctcactgcaacctccgcctcctgggtccaagcgattctcctgcctcagcctcccaagtagctgggatcacaggcatgcaccaccacacctggctaattttgtattttcagtagagaccaccacacctggctaattttgtattttcatgttggccaggctggtcttgaactcctgacctcaggtgatccacctgccgtggcctcccaaagtgctgagattacaggtgtgagccacgatgcctggctcaaaattttagttttaaaacacttgttaagatttattttttgacctaaccggtggtctatcaaaaagattgtatgagctattgcaacgggtgtgtttcctgatgttgagaagttttctctatatctgtgttagaaatacttgttttatactgccttcaagtccactgtttccttattaatattctcttgttttattattatcagagaaagtgaggtattgaaatatcctactataattatattgctttctatgtgtttattcaattatgtcagtatttaccttacatatttggaaccctaatgtgagatacacacacacatgcacacacacacacacacacaaacacgcaaacatgagtatatacaaatttttcataggttccccatcaatctattattgcttaatgtcctttgtctttttgagttttgacttcatatacattttatataatatgagtttttgacttaagatatagcttgcgtaatactattttgaccttttctgctctcatttggttaatatttggataaaatgcctacagcaatcttgccactttcaggcttttttaattattagttctaaactgactgttatagaaaggcaagtctggccttgagttttaatgttttttaatgaatccctttatttgaaactagaaagctaattatacctatatgtaagtaattttctaaaagacaaagacttccgttattttattaattattttatttgattcttgtatctttgtccctcattttctccctttctgtcttccattgtgtctgtttcattttagtattgatgtggtttcgcttctttcttattttcttttgggtgtctatacagatattttctttgtggtaccttagggattacataaaacctctaaaagataaagcagtatatatttaatctggtgaaaaatgaacttcagttatatacaaaaatttttcctcattacatctgccctcgactttgttattgatattgctgattatatgttgtatatttattaacagatattcacaataatttctgttcttttatttttctaattttagagcataattataaatgttttctgtcccattatgagaatgataaggaattctatttttgtgtatgtatgtttcccaggaacatgtatttttatatgattatgtgttgatttcttgcatcgtgttattttcagtggaagaaacttttttcagcatctttgatctatataggccatatgcagtgccaatatactgtctcgggatttggttattttagaaggtcttttttttttatttatttggtaggatgtttttgctgatgattattcttttcacctgacagcattttttcttcaggactttgacaatatcacacagttttcttctggcctgcaaaattttcttttgaaaaactcactgtttagtgtgtaactctatgccaataaatgacacatcacttttgtcttgcagttcttgagattgtctcgtctgtgacattttaagttgttcttatatatgtgtttttttaaataaatatcttgtatgtgtatttttgttttttgaacttctttatttttatatcatttttcttttagaattggttaattatctctttgtattatttacctccacaattactgtttttaaaatgcttttaatatttttgccgtttttcttatttttctgattttcagtagttgtctgtgctccttttactcattattattcaacttattttaaatttctaaaatttatacatttttattttataatgattgctttctgaaaatttcatgatttgtttgatggggccatgttgccctaatattttgtacacattgtaatctttgagactgggacatttaaaaaaaaaaaggctacctgtcacaatctttacaatgtagctttatcccggcatagtctaaaaccagttgtcatggctagacattctgggagcctttcaaacatgttcttagagtgtgtctgatctgaaatgttttattttctagtttaaaaagtttatttgcacttcttcctagttatcaatcacttgctacacttgttacctgtctgtggtactgcagtctgtctgctgctgtaacatttacctttggtctcagcagtctcaaattgtcattctaaagtatactattttttttcagcattttatttaatgggagaatgaaaccagtgtcttgaaagacccctaaaagccagacatagaaatgtatgtgccaatatttttcttgtcttttaaatagaaacaaggagttggcaatttacttctaagggcactatgttatactgaggagaaggaagtactgtgttgggttaatataacagatttttctttttcttctatgttgctttttacatcgtgttaacctggggcactttacacacttaactcatttataaattttccaaaaatgtgttttggtcagtatgtttttgttacattttatatgtttttgaataaattagagcctgtggtattttgctatgccatcttccttatgtagtatatacagttttataggttagatttgtaaaaaatatttacctgagtctagtaagtggagtaatttgttgtttttatttcttttagttatgtgttctcatattgctgaagacctttgcccagagcgagacataaaatattttttccaaaaagtcatactgaggagatatgataaatgtgaacatgagaatttacaattaagaaagggctgtaaaagtgtggatgagtgtaaggtgtgcaaaggaggttataatggacttaaccaatgtctgataactacccagagcaaaatgtatcaatgtgataaatatgtaaaagtcttctataagttttcaaattcagatagacataagataagacatactgaaaagaaaacttgcaaatgtaaagaatgtggcaaatcattttgcatgctttcacaactaactcgacataagagaattcatattagagagaattcccacaaatgtgaagaatgtggcaaagcctttaaccagtcctcagctcttactcgacataagatgactcatactggagagaaaccctacaaatgtgaagagtgtggaaaagcttttaaccggtcttcacaccttactcaacataaggtaattcatactagagagaaaccctacaaatgtgaagagtgtggcaaagcctttaaccggtcttcacacattactcaacataagagaattcataatagagagaagcccttcaaatatgatgaatgttgcaaagcctttaagtggtcctcagctcttactacccttactcaacataagagaattcatactggagagaaaccctacaaatgtgaagagtgtggcaaagcctttaaccagtcctcagcccttactcgacataagatgattcatactggagagaaacccttccaatgtgaagagtgtggcaaagcttttaaccggtcttcacaccttactcaacataagataattcatactaaagagaaaccctacaaatgtgaagagtgtggaaaagcctttaaccggtcttcacaccttactaaacataagagaattcatactagagagaaggcctacaaatgtgatgaatattgcaaagcttttaactggtcctcagctcttactacccttactcagcataagataattcatactggagagaaaccctacaaatgtgaagagtgtggcaaagcctttaaccggtcttcataccttattcgacataagataattcatactggagagaaaccctacaaatgtgaagagtgtggcaaagcctttaaccagtcttcacaccttactcaacataaaataattcatactggggagaagccctacaaatgtgaagaatgtggcaaagcctttaaccggtcttcacacctttctcaacataagataattcatactggagagaaaccctacaaatgtgaagaatgtggcaagccttttaatcgtttctcataccttaccgtacataagagaattcatgctggagagaaccccaacaaatatgaagaatgtggcaaagcttgtaaccattcctcaaaccttactaaacataattcataatggagaaaaaccctacaaatgtgaagaatgtgtcaaagcttttaactgttcctcaatccttactaaacataagggaattcataatagagaaaccctacaaatgtgaagaacgtggcctggcttttaacaaatcctcaacatttactaagcataaaataattcatgctggagagaaactcttgaaatgtgatgaatgtggcatagcctcttcccagttctcaactcttactaaacatgagaacacatgtggaagataaagcctacaaatatgaagaatgtgacaaggcctttaaaagttctcaacccttattacacataatttatactggacagaaatcctaaagtgtgaagaatgtcacaaagcccttaataagtcctcaattcttaacagatataagatgtttcatactggagcgaaactacaatcctgaatgatgtcacagtgcttttaacaatacctcaaacttttctaaacataaaaaaaaattatactagtgcgaaactctagaaatataaagaacatgaaaaacttttaaatggttttcacacttgattgcaggtaaaataatttataccggagaaaactccaagtgtgaagaatataacttttaaccagtgttcacaacttattgtacaggaaagcatttatagttgagaaatggtgtacaaatataaagaatgtggaaaagtcattaatatttgctcacatattacacatcagagagttcatacttaataaaagtattataaatacaattactgtcaaatgatctttcagaaatataaacctttaaagtgaagaagagttcattctaaagacaaacattacaaatataaaggggtttgtagtgcttttacttgtatcacagattttattgtacacattttgtactagagaataaccctgaagcagttgctaaaattttgttcagcattaggaaatttatgttggagaagaattcagcaagtgtgattaatttggaaaaacattttttccataactatagcttagaaaatgccagagagctcatactaaaatatacttttgcagatgcaataaatacaaagaaatatttaattcaaattgagtttatataattatcagagaattaacagtagaaatagctaaggcactgacacttcagacattacactaaatcagattgctgagtatagaaaatccaaaactacagttggtaagtaaattaattttatgtaactttaaaatgagtagacatttctttgagaagtcataattaaattcaagtatacttttttgataaaattataaagctttttaaaagtaaataatgatgtaagtcaactctcaaattacttcatgctgtttcttcatttctattgtattcacctgtgaaagcatgtgatcaactattgctgcatcagagatatgagagatactttattaggtgggaattatatacgacctcttctataaaatagtaaggacactgaaatataagatgcataagagtctaagtgaagaggttctttgtggttaacttagtgatgtatgaagtagttgctcatgttatgagagaaaaacatttttaattttagttaaatgtaagttaaaattaaaatagtaccatataatgttagtgattgtacttttatttaataaaatgcagtacattttaaaatttttagattatttgtggacttaatttataattaaatattttcttttaccacgttaagactattgtacgttcaggccgggcacagtagctcacgcctgtaatcccaacactttgggaggctgaggcgggcggatcaattgaggccaggagtttgaaaccagcctggccaacatggtgaaaccctgtctctactgaaaatacaaaaaattagccaggcatggtggtgggtgcctgaaatcccagctatttgggagattgaggcaagagaatcacgtgtacccaggaggcagaggttgcagtgagccaagatcacgacattgcactccagcctaggcaacaagagcaagacttcgtctcaaaaaaaaaaaaaaaaaaaagacttgtgcattcagtggagtattattattccactaactttaacataccccaccttactcaagggtgtaggtaaaatatggtaacaatatgctatttggcaacatagtggaataacacctctagtaatctcttctgccaatggcttcaaattgcaaataagttaaaaaatatttttcccataggttacatttttatcctttttttcttaaatttattctttttaattttgtggttacacagtatgtgtatatatttatgccatatatggcatattttggtacaggcatataatatataatagttacatcaggataaatgaggcatccatcacctctagcatttatcctttttattacaaacaatttgattagtaaaataaaaatattgttattttaaaatattaaaagtactttattttaaaatttgcaattgttctgactacagggtcatttttatggtcataataaaatttatatagaagtataaataaaattgatacatttctaagtactgaataaatatttaaagaatttgttacatatttttctttgaacatgatttatctctgcctgcaaacacatataggcttttagttttgatttacatagagttaaacatatacatatattactctaaagataaaccttaggtgtaagaaaattatgaagtaagtgtgtatgagtatgagtttgtacccatttttggaaggagaaagcaatattggaacaaaacaaattattttaataaggtgacttattagaaaactaaaaacctcgaaaatgttgaaagcaaatctatactctgtgcattgtattgaattcattgctataaaatgttagggcttatagttcagaatctccctatgcacattctctgtttttacttgtctggtactcatgctagacccataatgttcttgttttgtattttatgaagtactcattatgtgagctggtcagggattataagaatgatttttatgaaatttaagagtgcacacaaaataatttttagatgtaattacaaaattagttatatttttatataagttagtttttatataatagttatattgttatattttaacgtttgatttttgttttattggagaaacctgtataaggctaattttctttattgtttctttcactttttataattgacataagtaaatctattgagtgagctaatttgctttggtaagtactagggagacttcataagtcatgaggatgtttttacatataaatgtagcaaacaaatatgacagttcttctgagtaaaacatgctttataataagtcataaatatttttgctggagttagtttgtaacttcaagtcagagatggaaaatagcaatggtgaagaaataacattgattcatcatgtggagaggacattttcaggctgcaaagctgacttgctgaatttaaacacaaattctgctgcttttattttctactgatcttcagttttgtcttacttagtgtattccaactatatatgcatcacagtctttcttcttttactgtgttatgactacagttttctcattgttgtcttcatgccatgtcattttacatggtagtttgtgggttctcatgagaaagttggtatttttaatgcattgaaaaattggttttaactgaagaatttgcttatcaataaaactttcagattagtcaattaagagaatagacatacactgttaacaagtgaaaagattacatcagttagctttttctttgtaaaaaaaaaaagttttattcttgcaaaaagcatggcaaatataaaatttgtaaaaatatttcagaaattagattctaaatagagttaatggtaaatgaacaattttaaatttaattttctatgatatatttatagcacaacttatgtttctatgcagaatctttttttttttctttttttgagacagagtttcactctctctcccaggctggagtgaagtggcccaatgtcggctcactgtgacctccatcccccagattccagcgattctcctacctcagcctcccaagtagctggaattacaccacgcccagctaatttttgtatttttagtagatatggggtttcgccatgttggccaggttagtctcaaactcctgacctcaggtgatccacccgcctcggcctcccaaagtgctgagattataggcgtgagccactgtgactggcagaatcttatatttttaagtgtgaatgttgaatgtggcaaaacagtacaatgacctgtggatctgaaatttggaataatatttattttacatcttgataaaacaatttggagaaattccactcttttttttttttttgagatggagtctcgttccgtcacccaggctggagtgcactggcatgatatcaactcactgccacctcctcctcccaggttcaagcgattctcctgcttcagcctcctgagtagttgggattacaggtgcacaccaccatgcccggctaacttttgtatttttagtagagacggggtttcaccatgttggtcaggctggtctcaaactccggaccttgagatccgcctcggcctcccaaagtactgggattacaggcatgagccactgcgctcagcccatattcttttatatgacttttttttagtaggtacagtttagtctacagatttttactcacctaactgtagccaactccttgatcattggtaagtgactgattagtaattccaaactattgaccggatgcagtggctcatacctgtaatcttagcactttgggaggccaaggcaggtggattgcctgaggccaggagttcgagactagcctggccaacatggtgaaaccctgtctctactgaaaatacaaaaattagctgggcatggtggcgagcgcctgtaatcccagctactcgggaggctgaggcaggagaatcacttgcacctgggaggtggaggttgcagtgagccaagatcgcgccactgcactccagcctgggcaacaagactgaaactccatctcaaaaaaaaaataagtaaatacaattttttaaaaataaaaaaagtaattccagactattttagtcactgtaaaaacttaatattctttaattattaaataggaaaaagtattctgatattagtgtttctgaaactttcagaaagtgtaaaccagtaaaaaaatgatcaggtatatgcagaccataagttttctatttaatcataggctcattctagcttttaatataaaaatttgataaaaggtaaaatgagtggttcttttaaataataagagaaatatcattgttagtagccatttaccaatgtatttttgttaggcttagtaatgagtactttaaaccaaaaatccagttctacatactatctaaaggtataaatagtgatttttaaattccttttagattctactaaagtagaaaattcaaagccaaaatgttacgttggaaatggaaaaaagcattaggcgagagggtgttgggcttaatgattaagattgatacttagtatgaggtggttcctgtttgcatcctagttctgccacttatgagctgtatgacctgaatacagtttgttaacctccgtgtgcttaacccttaagctgtacagtgaggataatagtgcttaaatcttaggatattagtaaaatcagagcaattaatactgataaaggtaccagaagagttcccagcacatcgtgagtgtacaggaaatttatcagctcttgttgattctgttagctcgtgatcaatgttgagcctaaaaagaacgtggccgaatcagtggtttgtaacccatgtttattctaatcagtcagtccggggctataatggtagttggatgtttttaatactatctttggcaaattcccatatattcacatacagcatagttacaaatatctgtggaaagatttcttgttgagtactgctccttagcactccagtaacactagataaataagcacttaaatgcctagtgtttgtcagtgttaaaattaaagaggcaaattgtttcttcatctgcttgtttaataaatttcttattgccaagtatttatgttcatttgttaaacttaaatgtagtttacaaatatgtattcaaatattttttctctaacaagtgaaggaaatcatctacttagacatttagagaaaactttaaacagttgctttagagtctgtttcttagtattacgttatgttgaacattcaaatcaagatattttatttctgaattttgggtccagactattaataatattaaaagtttacctacctacattactaaatgagaaaggcatttgaaatatatatatatataaaatataaatatatatatatatatttcttcatcttataattccaggaaacatatgttttaatttatatatatgtgtttatatatatatatgtatatgttttaatttatgtatgtttcctggcattttaagatgaagaaacactttttctctgacccaatttcttaacgtttatctctttaaaaaaaaaaaaaatgtactggctgggtgtagtggcttacgcctgtaatcccagcactttgggaggcccagatgggcagatcacctgaattcaggagttcgagagcagtctggtcaacgtggtgaaaccctgtctctaccaaaaatccaaaaattagctgggtgtggtcgtgggcacctgtaatgccagctactcgggaggctgagcaggagattcgcttgaatccaggaggcggaggttgcagtgagcaagttcacaccactgtactccagcctgggcaacaagagtgaaactccttctcaaaaataaataagtacaaaaattagccaggcgtggtggcgcacgcctgtagtcccagctactcggaaggctgaggagggagaattgcttcaactcgtgagacggaggttgcagtgagctgagatcacgccactgcactccagcctgggcaacacagtgagactcctctgaaaaaaaaaatagtatttttattggaaaatcagagttttatacattacagtgtacaaagtgatgttctgatatatgtatataaaataagtaaagttacataacgtatcaataacctttttgtggtgagacatctgaaatgtactcctattttgaaataatgcattattgtttactatagttatgctgctgtgcaatagatctcaaaccctatttgcctctgtctatttgaaacgttataccctttaacaaatccctatttccctctcagacccttgccttctagtcaccattatttcactttctacttttttgagttaaactttattagattctgcatataaatgagatcatgcagtgtttgtctttctgtgtcagacttattccctctagcatagtgtcttccaaatttatctatattgtttcaaatggttggatttaccttcttttaaggctgaattgtattccatttaccacatttaaaaaattaaatatatatttatttgttgataaacgtgtgttatgtaaaaatatttgtgttaaagcacatattaatgtaattcagcatatgaatatcttattaatagctaatttgtactgagcactaaccataacattatttatgtgttaatggattttaattctcacagtaacttaatacatctaaacactcatttttaataaaaatcaaaaattgaatcatttatattgttataagattgtatagaatggtacatgaaaaaataatttaagcaaaaaagatattaatatttgcaatacataaaattggaaagcagttaattatttggagatgatatctttgtttacttagataacaaaataaactataagactattttaaaagtctattcaggtgggtaggcaaaattctaagatgatcccaaggattccaggtctgttgcacatctgctgtgcattccttttctcttgagtgtaaaaaaggtgtgactgtggtgagaaatcactcatgaaattaggttactaatatgttgacttggtgttcatcaaaagggagattatctcaatttggctaaactgaattagaggtgcttttaagaggaagagacacatcatagtaaaacactgctgcttgcctggaagtaagtgacttctaggtgggccatgttgtaagctgcttttggtggtcacatggcaggaaatgtttgtatattgtaatcatttctgcttcccacatgttgctttccacaggaagacagaagaattccatgacaagaaaataaagggtgggggggtctcattcatgcaagaaataatcacttctcatttgagatagcattaaggtgacagaaaaaaccacaacatgaccacatcaatgagaggaaaaagacaacacggtcgaaggtgctcactggcattatggagaaacattttgtaagccatagtgaatgatcagcctctgggataccggtagtctactaagaaagctaaactcattctaataaatcagcatatctgcaccattctggttggcccagttttacactatccatttcagaaataccatggagaccagtgggtaccctcctaaaattgaaattataattagaaagcatacctaattatttgttttcataattgaaaagccttgaaaacaatgaatttattaataaggaactgctaattttagaagatcctattatactgtattacaacattgaactttaaacaccttgagtatttcttgaatgcataaacagttacgtagatagtttctcttagattaacatgataaaggtaacagaaaacatttgaaatggaataaaattaaagccacatgttttcaatgtcttggcgtaattgccatgctttttaaaacggccagaaaaataaataaataaaaaacaataaaacagccagttactaccaagaagcaaagacaagattttagctttgctcaatcattacatgattgacctttagaaatctaaaactctggctaaaaaattaggagaaattttttttttaggtaacttcctaggatttctgaggcaacacaagaattctgataggcagaaaaaaagcatactaaatatacacattgctcttctctgatttgctttaacattaaaagattaaaaattgcaaatataagctaaatttagagtatgttaacaaaacatttatttttcagccaagcaaataattatataaaattaatgagtaacagatgccatcatctgccaaaaaatagtatgactagattcagtaagtgtctagccatgaaaatgacagcccaattaaattaagaccctaataggtgcatgtggaaagcatgtgcaaaggtgctgcacctccacttagcaccttcttctgcctctttacagagacaccaatttccctagtgacttctggtgaatactgggaactaagaatgcattgttcagagcgattactgagaacatggttaacacagttttttcatattataataaaattttgtaaatcttactctacctctgaaaggcttttagtaaaagaattgtttatgtatggtactcaatttggattcatagaaaaatttacttttccaggtaaatcagagacacatgtcaatcaaattctataatacatacttgaatgagataaagtcttcttagctaagaattttatttcattagtacattaagagaaaaatagaaaaccagtactttgggcccaaaacagagtttggcatgtgagtaccactcaaacaagtgctctttgctctttatcatcactgttaaagtagcaatagcactgcgtgctttcctagaaccagctggcctgttttctactgataaaagtggagaaagcattgaaatagtggagggtaatataaattgaaaacttatatgaaatacaatttttaataaaaagcatttgatgttgtacaactccaggtgagactattagtgtgaggtcatatttttacttctattgacagaaaacttaattgacaatattctgatttccagtgatattcatttatctgctgtatatttgctcgctttagatcaatattacctgagctcaaaagaaatcaaccaaatgaatatccacgagcattttattattgatgcatatgcttattttgcttaaagtatgttagctttttatcaaagatttatacttttggtgtgttttttactgctgagaagtggctattctgccaggaaactggcattctcagctctacccacattgactaatagtgagtggaagtgatgtgtggatgaaaagcaaatgtgtcttctcagcatctcctttttcatccattggctgaagaaagagaaggacgcagatagaaaatgaaagtgtgccgggtgttgtggctaacgcctgtaatcccagcattaggaggccgaggcgggtggattacctgaggtcaggagttcaaaaccagcctgaccaacatagagaaaccccgtctctactaaaaatacaaaaattagccaggtgtggtggcgtgtgcctgtaatcccagccactcaggaggctgaggcaggagaatcgcttgaacctgggaggcagaggttgcagtaagttgagatggccccattgcactccagcctgggcaataagagcaaaactccatctcaaaaaaaaaaaaaagaaaaaataatctctgaaagatcatgaagaagtcctctcaacatcaaaagaaaaaaaccagaggatagtgatgtcagcagaaaatatattattttgctaagcctctggaatttcagcatacatcctgcattactttaataaatatattatttcttcagttttcttttttttttgagacagagtttcgctcttgaggaaaaaaaccagaagatagtgatgtcagcagaaaatatattattttgttaagcctctgaaatttcagcatacatcttgcattactttaataaatatattatttcttcagttttcttttttttttcttttttgagacggagtttcactcttgtcgcccaggctgtagtggtgcaatcttggctcactgcaacctccacctcccaggttcaagcgattctcctacctcagcctcccgagtatctggaattacaggcacccgccaccatgcccagcttttttttgtatttttagtagagacggggttttgccatgttgggcaggctggtctcaaattcctggcctcaggtgatccacctgcctcagcctgccaaagtgctgggattacagccgtgagccatcgcgcctggcctgttttgattcttaaggatataattcacttccttgttgaattaaaactgataggagaataattcatttgttaaggtaagtggtttagggaagacccattgcttttgaccaacatctccacctccagtcccaggcattattctattttctgcttctgtgagcttgaatatttttaaactctacataaaaataagattgtttggtattagttttttctctgctgacttatttcacttagcacaatgtcctctgggtttattaatgttgttgcaaatagcaagactttctttttaagactaaatagcattccattgtgtaaatataccacattttctttatccattcccttgttgatgaatacttaggttgacttcatacattacctattgtgagtaatccacatcctttactttcatttgtttttatatcatttttccttcctttttttattcctagaagtagattattcttaaaatgtaaattatgactgttaaatattttctatgccttattttggttaatattttggctgattaagaagataagtttctaaaaaattttttcgatcaaagccatttcttcattatcaacatcgtttgagacaaaatagtaataaacatcaacatcgattaaacaattatctaaccctataatcattttctaagctgcatctttgtgtcatctctctcggttataagaaagaggcttctgattttcaacataaaattttgtaaaatttaaccttttggtctgaaaattaaactgatcagttaccagaaaagttgatttttgatacatgttattgtaattgtttctacttaaattcttcagaaaacccaaactgacaacaaatgcatttaaatttttttgaaaattaaaagtgcctggccaggcacagtggctcacgcctgtaatcccagcactttgggaggcccaggcaggcggatccccaggtcaggagatcgagaccatcctggctaacatggtgaaacccagtctctactaaaaacacaaaaaaatttgccaggcgtggtggcgggcgcctgttgtcccagctactcgggaggcagaggcaggagaatggcatgaacccgggaggcggagcttgcagtgagccgagatcacaccactgcactccagcctgggccagactctgtcccaaaaagaaagaaagaaagaaaattaaagtgcctaacaaacatttttgtagaaattaaaaatacttgtagattttcagagaatgtctctcaaatacttcaagttaccttcttctgatcgtagatacatatttttctatattgctataatagagttttggctgtcctttgtggccagctccttcatttctatcttatttagttgtgcattatttatattacgtattttacattttaaaacttgtagaccatgcaatgtaactttcaaacaattgaaaaacctttttctatgttagactctctgcttaatcagtagtcagtttattttcacccttcaaaaacattttaactgcctgaaaatcaaagggacagttcaagtgagtattctgagctggttctctccactatcaatctattcaaattcacacaggttatcttataaagaaagtgcacttgaacaacattgtcacagcaatgtaaaacaggtataatataataaagatgagacactgccttctaggaaaagagttaatttttcttattctgtgtatgtgagtatgtggcagctgtaaggttgtcaataaagactaaagttagagagggagagagaacactttacattagtaatgcagcgtagttcctatgcagccttcttgtttgtcaaacatctcttgaattgttttgtcaagtattatgttgctgtatccatcacttattagactttgatgattatcttctactttatcaattaagtatgcaatcaacatcattcagagtcctgtccttgatgtttaagtactcagacataaaactattaaaatattgattaaaaaatgagtttgttttttttttttttttttttttactacagagcatttcatgccagtaagcttaaatctcttgaacttttgaaaacatgctttagtttatctttagcttggaaagcctaaattggtcaaaagcaaatataacaataaacttgaatataaatcattttggaattgaattcaaattataaaataaaatattaaatttgataaatgtattttactgtgtgtcagaaattttacaaaaattttgaatagtgtaataaagctgaaatggaaatacatacatgcttttatgataagttattttgtgatttaaatttttaatttaacagtgttatatagtagacttcaataaaagtagtctgtgtttaaaatgtgcatattgacatatcagagaagaaaatattgataataaagaatacaaaacaaaccatgacagtcttgatggctgttgtaagacctcgtttcttgtcttcttagttaaaaaaaattagagacacacaacaaaggaaatgaagcataaagtattgcaaaggagaatgactattttaaaagttaggtgcagaatagccagtacaccctgagagagaagggattcaaggcaggctgcttataagaatgagacagaaaagactgtgactagggagactgtatttatgcaaatcttacttagttatttataaagatgtgggaaggcagggcgcagtgcctcacgcctgtaaccccagcactttgggaggctgaggcgggcagatcacaaggtcaggagatcgagaccagcctggccagcatggtgaaatcctgtctctactaaaaatacaaaaaattagccggggatggtggtgtgcacctgcagtcccagctactcaggaggctgaggcaggagaattgcttgaacccggcaggcggaggttgcagtgagccgagatcaagccactgcactccagcctgggcgacagaggaagacttcgtctcttaaaaaaacgatgtgggaagaggtgttactacaatagcatgttctaggtggttctcttggtgcacaaacacagtagctgtacatgcttgttcatacgtcgcatgtttcataagcatcctaaatcactcacaggtgtgcattttcctattatgagtaaaaggttagtttgagaacaggtaaaatcaaaatgtgcatactatctaactggagaaagtgttgcttgaatgagctgaaatactatgcaaatgctgtggtttattttgttgacaatatgcagtcatcatgcaatcaccatggttgttgcatttcaaggacatggtcactttcttgattacctatcctgcctaaatagtacgtcttaatttattcccaacttccaactctgtgattaagatttagctgttatgttaccatagacaatagtgggaaaaaaattttttttttttttgagacggagtttcgctcttgttgcccagacaatgcaatggtgtgatctcagctcatcgcaacctccgcctcccaggttcaagcaattctcctgcctcagcctcccgagtagctgcgattacaggcatgtaccaccatgcctggctagttttgtattttcagtagagacgtggtttctccatgttgaggctgttcttgaactcctgaacttagatgatctgcccgccttggcctcccaaagtgctgggattacaggtgtgagccactgggcccggccaggaaaataaaaattttaaaaataaacatatgtgagctttatctaggttattagctgtgtgtgcccaggagaaattattttacatccttggagcttcaggattcacaattaataaaaattactatttcccccggggctgttttaattcatacatggtagctgtaagtattttttactgaaactcttgtctaaatatattatagtaaatattaagaataaaattattcatatttcaaatattttattgtaattgagtgagtatattttgtcatatttcgtgtatttatccttttttaaaaatgccagccagcctcggcctcccgaggtgccgggattgcagatggagtctcgttcactcagtgctcaatgttgcccaggctggagtgcagtggcgtgatctcggctcgctacaacctccacctcccagccgcctgccttggcctcccaaagtgccgagattgcagcctctgcccagccgccaccccatctgggaagtgaggagcgtctctgcctggctgcccatggtcggggatgtgaggagcccctctgctcggctgcccagtctgggaagtgaggagcgcctcttcccggccgccatcccgtctaggaagtgaggagcgtctctgcccggccgcccatcgtctgagatgtggggagggcctctgatccgccaccccgtctgggatgtgaggagcgcctctgcccggccgcgaccctgtctgggaggtgaggagcgtctccacccggccgccccgtctgagaagtgaggagcccctccacctggcagccgccctgtctgagaagtgaggagcccctccgcctggcagccgccccatccgggagggaggtggggggcagcccccgcccggccagccgccccttccgggagggaggtggggggcagcccctgcccggccagccgccccatcagggagggaggtgggggccagcccccgctcggccagccgccccatcgcgggggaggtgggggccagcccctggcccgccagccgccccgtcagggagggaggtggggggcagcccctgcccggccagccgccccgtctgggaggtggggggcgcctctgcccggccgccccttctgggaagtgaggagcccctctgcccggccgccaccctgtctgggaggtgtacccaacagctcattgagaacgggccatgatgacgatggcggttttgtcaaatagaaaagggggaaatgtggggaaaagatagagaaatcagattgttgctgtgtctgcgtagaaagaagtagacataggagattccattttgttctgtactaagaaaaattcttctgccttgggatgctgttgatctatgaccttacccgcaacccggtgctctctgaaacatgttctgtgtccactcagggttaaatggattaagggggtgcaagatgtgctttgttaaacagatgcttgaaggcagcatgcttgttaagagtcatcaccactccctaatctcaagtacccaggtacacaaacactgcagaaggccccagggtcctctgcctaggaaaaccagagacctttgttcacttgtttatctgctgaccttccctccactattgtcctatgaccctgccaagtccccctctgcgagaaacacccaagaatgatcaatttaaaaaaaaaaaatgccaaaataagaatttttttttttttggaataccaggctaagagtttctatattgtgactttgctaagtttttttttttttttttttaatttatttttttattgataattcttgggtgtttctcacagagggggatttggcagggaaggtcagcagataaacaagtgaacaaaggtctctggttttcctaggcagaggaccctgcggccttccgcagtgtttgtgtccctgattacttgagattagggagtggtgatgactcttaacgagcatgctgccttcaagcatctgtttaacaaagcacatcttgcaccgcccttaatccatttaaccctgagtggacacagcacatgtttcagagagcacagggttgggggcaaggtcacagatcaacaggatcccaaggcagaggaatttttcttagtgcagaacaaaatgaaaagtctcccatgtctacttctttccacacagacacggcaaccatccgatttctcaatcttttccccacctttcccgcctttctattccacaaagccgccattgtcatcctggcccgttctcaatgagctgttgggcacacctcccagacggggtggtggccgggcagaggggctcctcacttcccagtaggggcggccgggcagaggcgcccctcacctcccggacggggtggctggccgggcaggggggctgaccccccccacctccctcccggacggggcggctggccgggcggggggctgacccccccacctccctcccggatggggcggctggccgggcagaggggctcctcacttcccagtaggggcggccgggcagaggcgcccctcacctcccagacggggtggctggccgggcaggggggctgaccgccccccacctccctcccggacagggcggctggccgggcggggggctgacacccccgcctccctcccggacggggcagctggccgggcagaggggcacctcacttcccagtaggggcagccgggcagaggcgcccctcacctcccggacgggtcggctggccgggcgggggggctgaccccccccacctccctcccggacggggcggctggccgggcggggggctgacccccccacctccctcccggacggggcggctggccgggcagaggggctcctcacttcccagtaggggcggccgggcagaggcgcccctcacctcccagacggggcggctggccgggcggagggctgacccccccacctcccacccggacagggcggctggccgggcggggtctgacccccccacctccctcccggacggggcggctggccgggcagaggggctcctcacttcccagtaggggcggccgggcagaggcgcccctcacctcccagacggggcggctggccgggcggagggctgacccccccacctccctccccgacggggcggctggccaggcggggggctgacccccccacctccctcccggacggggcggctggccgggtgggggggctgaccccccatctccctcccggacggggtggctggccgggctgaggggctcctcacttcccagtaggggcggccgggcagaggtgcccctcacctcccggacggggcggctggccgggcgggggggctgacccccccacctccctcccggacggcacggctggccaggcggggggctgacccccccacctccctcccggatggcacggctggccgggcgggggggctgaccccccacctcccttccggatggggcggctggccaggcggggggctgaccccccccacctccctcccggacggggtggctgccggtcggagacgctcctcacttcccagatggggtggctgccgggcggagaggctcctcacttctcagatggggcagctgccgggcggaggggctcctcacttctcagacggggtggttgccaggcagagggtctcctcacttctcagacggggcggccgggcagagacgctcctcacctcccagatggggtctcggccgggcagaggcgctcctcacatcccagatggggcggcagggcagaggcgctccccacatctcagacgatgggcggccgggcagagacgctcctcacttcctagatgtgatggcggctgggaagaggcgctcctcacttcctagatgggatggcggccgggcggagacgctcctcactttccagactgggcagccaggcagaggggctcctcacatcccagacgatgggcggccaggcagagacactcctcacttcccagacggggtggcggccgggcagaggctgcaatctcggcactttgggaggccaaggcaggcggctgggaggtggaggttgtagtgagccgagatcacgccactgcactccagcctgggcaccattgagcactgagtgaacgagactccgtctgcaatcccggcacgggaggccgaggttggcggatcactcgcggttaggggctggagaccggcccggccaacacagcgaaaccccgtctccaccaaaaccagtcagggtggcggcgcgcgcctgcaatcacaggcactcggcaggctgaggcaggagaatcaggcagggaggttgcagtgagccgagatggcagcagtacagtccagcttcagctccgcatgagagggagaccgtggggagagggagagggagagggagagggagacggagagggagagggagagggagagggagagggagagggagagggagagggagagccttgttcgcttaatttaaaaaaaaaaaaatgccaaaataagaattttttttttttggagtaccaggctaagagtttctatattgtgactttgctaagttttgcatatgattttgactgctaccattgaactcaggttgaatattaaacccacttttgtttagcttgtgtggtttttggttcatccgtaaaacaaaatatattatacatgaactgttggggtaacttggcttcatttttgttctctttctgttattacatctgtggctttagaaatcactaagattcggccaggcatggtggctcatgtctgtaatcctagcactttgggaggccaaggcaggcagatcacctgaggtcaggagttcgagaccagcctgaccaatatggagaaaccctgactctactaaaaatacacaattagcccagcgtggtggcacctgcctgtagtcccagctactcgggaggctgaggcaggagcatcatttgaacctgggaggtggaggttgtggtgagccaagatcgcaccactgtactccagcctgggcaacaagagcaaaaatccatctcaaaaagaaaaagaaaaagaaaaagaaatcactaagattcaaataacgttagttgggactcaagcaacagaaaatcccaaaaatgactcagaaaaatagctactggatagtgcctttcagtgagatttatacgtgaaacagaagccaatatattttacaaacttattgcaagttcattaaatgtagaaaataattgcctgcaacatattaggcacttgtcttagtctatggcatccctagcttggggaagctgacattacagaaaagaatattgctactctaatgagatttggaacaaatacttatgtgcttttaaacattctctttaataatccttagatacatgtcattctggctcaattcttttagtataactgtctacagttctagagactcagtcccatcaaatttaagccatggtattttcagctttttatgtttatttttagctagtgagcttaatagttgatattattatattggggtcaccatggcaatctgggccttagagttgaccatcctacctcatcctttttgtttcacatgctctgttgttgaatccctctcactttatatttgagccttaaggaggcttcagtttggaggaaccagaggaatgggtttctatatatattgagttgagaattagaatcctcttaaggatagagatcttacatttattatttacagtacaaagcagtatttataggatgtagacatattttattcaaatataaataattttatcagtatgccaatgtggtcaaaataactgcatcaacttcacccaatgttctgcttcagactctgccaacacaaagatcaatatgtatgcattcgtggatgttagtttttttttttggtgtaggttttcgtttgcttaaatttttaaagattttgttcctacattatgctgatgttaagctaaagaagtacatctaactgccattagaataaagataatgataagaatgatgactaatcttaactgctgtctgctgacagggggcactgttttggcaagtcagcagtcagatctccctcagaggcctatgtaagggtctccagtaaaacgtggccatcatctgaggctccagttgcatggccatttggagtttaatggcctgaatgcaagaaaagacaaactgggttattggaagacatgtattaaaatgaaacaagagggtaatgacagcacaaaaatcctaaggctgctgacacacccagataacaggtggctatagttatgcctgctaagatttgggtgcatggggcttggatttcgttagctccattgttcttattttcccaaacatagaaacctccaggttatgggtactctagttactcctatcacctgacaggatttgcgggataattgcccagaactgaaatgtggatccagattgttacattaaccattcctttctgtttcttctgcactgtagctggagatcactggttgatttcacaggaataaacagggttagtctaaattgcaaggaaaaacttaaaaactaatgagactataatttaatgacaagtgtatgatcagtttggaaacataatttttctctccagttctcatttttgttaaaaacacatcatgataggactgacttgtttgcaaaataaaatttagtcttatacttggcctgattgtttgtataaagtgcaggaagaataattatttttaaataggcttttaaaattcactttgatgggactctgttctacaaggaatctatgatataactttttaaagccaagccccctcatgggtttgtaatctcaaataccgaggaattaggtgaattcctttcttcttgagttcccaagtatatggggttcctgggcctgttacaaagtgacattttttactcaacacatgttaggaaccctgtacagggactgtgtagagaggtatgagaccagtttgctctaggagcttttattggctctgcaagttgagcctgattccttaaagggaagcatatttttccagtcaaagccttggtaaaacaaccagtttctccaattgtaccctgtcacaaaagaaaatggattcttattgcactgatgcaaacaaccatattaccataagttaagaacactcacagataagcttccaaattctgtagaaactagccagagaaaaacaaatatgctccaaattttgttcacaggagtatactttactcaattattaaaggctgtaaatagctcaaggtaagtttccttgactatggaaaacaaaacaaaaattagcaatgtttgaagcaaaaagttgaaaaaaaaattacttcaatttcctattagtttagtccattgagctaacttttgttctgcttgatattcatgaacactttagctcttcatgagttctgtatgtttctcctgtatttcaatgtcacaatctctaaatttatcagaaacctgtatttgagagcacctgttaaagtcctatagctgattataaaccatcttttgaaaaagatgaaaacaagaaaacaattgtctgtgaatgacaacatgtccagggaatagtccaaaacacaattgaggccaggcacggtggttcacgcctataacccagcactttgggaggctgaggcgggcagataatctgaggtcaagagtttgagaccagcctggcctacatggtgaaactctgttcctactgaaaatacaaaaattagccaggtatgtttgtgggcacctgtaatcccagctacttgagaggctgaggcaaaagaatggcttggacccaggtgatggatattgtagtgagccgaaattgtaccactgcactccagcctgggtgacagagtgagactccatctcaaaaaacaaacaaacacaattgacaaataaattttgttatctctgttttacaataacatagcaacctaactgtgattgatagcatatatttagacattagaattctagaaatcccatacaattttgaaacacatattaatattattcactaaaatattatgtgaggaagattaaacattattttggcaatcccatctacctaaacatgtcaaataattctgattttctctcttctggatgctccaggggttctctgtatcactgaagcatccaaaagctaggggtcaggaaagacaaccttgaagctgaaatttgattttgggaagcctgtcaaatattagaggttttaaatacttgatattatgaaatacaatttcaagttaccataagttatttattttgccaaaatgataacttgaaaattttaaaacaaggcaaaagcctttacttattaagaggggagacttagctttctaaacaatttgtcttttctcttttctttcttttctttggcagtctacctgcaaggtaaacagaaatgtttcattaatttttcttttttttttctccagacagagttttactttgtcacccaggctggactgcagtggtgcaatttcagctcactgcaacctccacctcccagatacaagcaatcctctcacctcagcctcttgagtagctgggtccacaggcacacacaaccatgcccagctaatttttgtgtttttattagagacggggtttcaccacattggtcagtctggtcttgaactgtagtgggatattttacggaatcagagagaccaaggggttgaggaggatatttattatttaggtgcactggcccagtcggattaacatccaaaggactgagccctgaacaaagagctaagtcaccttttaagcatttcgtggggttgggagagatctgtgcagagggaagcattttacagaagtgagaaacaaagacagttattcaattaattgagacatgcactacatcatctcttactttttaaggaaaaacattttttatgacttgagtttatctgtctagtgacaatgcagctgcacagctagagaaacagggtcttcacaatgcctgggaaagagtgagataaggctcgctagccacagaaaaacaggcagttaatttttaaaggactccagcctttctctttctcagggagggattggattttcttacatacaactgagtttctgtttacacattctttaatttcttttaattcctgttccagaactcctgacctcaggtgatctacccacctctgcctcccaatgtgctgggattacaggtgtgagccactgtgcccagccattatcttttactattacatgaaaatcttgtacaaggaagagaaagccaaattttactcttgcattagtctactattaatatcaaacctaattttctaatgaaactatataggcaattctatccaatcttaatcagtttgaccataaggtaaaattcttataaaccttttgtaatcatttataaatttgctaaagcacagactagtgccttacggaaatgtttttcttttagttcaatgcacaatttatggaataacaactatataataccctcttgaatttagtcagtatgttcatgcacagaatttcttttgcaatattaatttttatagtccatccacaatttgtttaaaccatcagttttttttttgtttttgagacggagttttgctcttgttgcccaggctggagtgcaatggcgtgatctcgactcagtgaaacctccacctcccattttcaagcaattctcctgcctcagcttcctaagtagctgggatgacaggcatgccccaccacacctggctaattttgtagttttagtagatacggggtttctccacgttggtcaggctgttcttgaactcctgacctcaggtgatccccccgtctcggcctcccaaactgctgtgattacgggcatgaaccaccatgcctggccatgtcattcacatctgctagtttgagcctgccttgatgcctccacttcccagtttagataattgggtgcttatattaacctgagctgaatttattggtttactgctatcagctttatcttatctaattcaaaataatcctttaaacctaggtaaaaatttaaactttcatcccttttataatcttttactaaaacatattttgctgttcttacacacctggcatgtaaattcatttttagtggtctttattacatgttataatggtaactcagcaattttaaactttaatgtaaaacctggtaacttattttaattatgtactaagggcagataaagttttactgtttccagcatagttggccgggctgatcttgaactcctgaactcaggtgatctgcccaccttggcctcccaaagtgctgggattccagacgtgagccactgtgcctggccttattcagcatttttaactttgggtgagggtctttaagctgaagctagtttatctctggtcctgtcctcaccagaataaaacataacattcttgacatccggatatagtaatacataggtagattgataaataaatatgaagagaattatgtttttcatgcaaatatttatgcatacaaaagatgttaatcaagagacattttcaatacatcagccaattttgaggacatagatgaaaatttacttctcatctatatgtctccattccatcaaagactcaaatacacccaaacaatgttatgtgtagacatcaacaaaccttcacatttacaggcatggcctgggaaataagtttttactattaccatttaagtctttgtgtccagcttagaatttcagaaccctgcatttcttctcctggtatgcatgtgttttttacatccacaattttgggcctgccctgatttctctattttccaattcggctaattggctcattatatcctcccaagctaagctaattggcttattgttatcatctgggttgtgctaattggcttattgaattcacctgtgcatcagggatttaaaaaaatgatgaccactgaccaatttttttttttttttttttttgagatggagtctcgctctgtcatccaggctggagtgcagtagcctgatctcagctcactgcaagctctgcctcctgggttcacgccattctcctgcctcagccccccgagcagctgggaccatagatgcccgccaccatgcctggctaattttttgtgtttttagtagagacggggtttcaccatgttggccaagacggtctcgatctcctgaccttgtaatctgcccgcctcaggctcccaaagtgctgggattacaggcatgagccaccatgcatggacttttttttttttttttttttttttttttttttttaagatggagtcttgctctgtcacccaggctggagtgcagtgttgcaatcttggctcactgcaacttctgcctcccaggttcaaacgattctcctgcctcagcctcccgagtagctgggattacaggcacccaccaccacacccagctaatttttgtatttttagtagagacggggtttctccatgttggtcaggctggtctcaaactcctgacctcatgatttgcctgcctcggcctcccaaagtgctgggattacaggcatgagccaccgtgcctgaccaaaaggtttttttttatactgccctcagtacaagtagctatcaatatcttgagcttctatattttttattctgcatgaatatggagagaatgctagatagatgattatagatgtacataggtagagaaatattttaacacatacatgcagcattatattagtttgtctatgtaaatgtttatgtatacaaaaaatgttcatcaagtgacattttcaattcctcagcctatcctgaaaacaaagatgaagacatacttctcacctagatggctctatacaattacggagtgaaacggagccacacaatgttatttataaacatcaacaaaacttaatgtttatggtcaccacctgggaaataaacttttagtactgccttgtaagtctctatgtctagcttaccactttaggggcctgcttttcttctatctgtatgcctgtgtcattcacgtctgctagtttgagcctgccttgatgcctccacttcccagtttagataattaggtgcttatattaacccaagctgagtttgttggtttactgctatcacctgtgctgagttaattggcttaatgaattcacctgcactgcaaatgtaataaaggagatgacctctagtctacttttcttcggatgctttttttttaacaggacacatggacaaatgaccattacatagatatacccatggaagttattatgtgtgtatatgtttatttatgcagctactttatatctatatatctatataggtatgtacagaataaagcttccaaagttaactaggtcagagttcatttccattttcttttcctccatgccatttaaatatgattagcaaattagttcagttaagttgtattcagtctgagccatacacatcacatttttttcataaatgtgaaactgcttttgtcacctgaaaccctgtagtttgtaattgtgtattctattaaaccactccagcggggttctgtccattcagctagaaacagccagatatgcctgacaccagtgtgcctagccttcatcacaaagcaaatttgacctgggcaataatagccatttttggcacttcagtgaacattcactatcacctggttgaaatgtggccaggtaccatgcactgttataattactttcagtatcaaagtctatcttctaaaaagagatctagacttttttccattaccatagacaccctacatcagcaacaaagagtagttgacaatagtgcacatttacattacacattcatgaagaaaagaaaaactcatcttgatggaggccccagtgagaaagaataagcattctgaaattgaggttagggtctttgtcctgggactggtttatctctggtcgtatgtacagcagaaaacgaaggatcaacattgacatggcaatgagtgactcccatggcttaagtgcatatttaaatgtgggtgagggcctttaagcgaggctagtttatctctggttccatgttcaccagaatcaatagaaacctttttttttttttttgagagggagtctcacactgtcgcccaggctggagtgcagtggtgccattgctcactgcaacctctgcctcccaagttcaagtgattctcctgcctcagccacccaataggaacaattttaacttaacaataaaaacctctttgggctttaataaatattattcttacagataagagcaataaagctaagaggaacaaagcttcacatttatgggcatggcctggatagtaagctttcagaactacctcgtaagcctttaagttcaggttagcattccaagaccctgcttttttctcaggtatgcccgtgttattcacagccatcattttggcctacctaaatgcctttgctgtccccatttggctaattggctgattatattcacctgagctgagctaattggcttattgcaatcatgtgggctgagcaaattgtcttactgaattctgggctgcagggatagaaaagtaagaccacctctgacctacttttattctgaagcttttttttacaggacagatgcataaatggacattttgtagacagacccatgtaatctattctgtgtttatatgtttatcaatctactgatcttatatctatgtttacatgtacaaaaagaggcccctaacataaactatgtcagaggtcatttgcattttcttttcctccaggccagataaatctaatcagccaatttgctcaataacttttgtttgattcaagctacccaccacatcacttttttgataagtgtgaaaatgtcctacttacctggaacctgggttcttttaattttgcctctcaccaaaccagcccattgggattctgttcatccagctaggaaatttaaaaatacctgacaccagtgagcctagccttcctcacacacaaaaaaactttggcctagtcaacaagagtcacctttggcaccttattgcatgttcgctcttgcttcacaggaatttggccagacaccatgtactcttatatttgctttcagtatcacagtctatcttctaaaaggagagctagactttctttccattaccataaagaccctacttcagccacaatgacaaaaagataagattgcacttttacatcacacactcatggaataaagaagcaaaaaccactgtctttttttttttttctttgagacaaagtcccccaggctggagtgcaatggcatgatctcaactcactgcaacctccgcctcccgggttcaagagattctcctgcctcagcctcccgagtagctgggattacaggcacctgccaccacacccagctaattgttgtatttttttttttttcagttgagataaggttttgccatgttggccaggctggtctagaactcctgacatcaggtgatccacccgcctcggcctctcaaagtgctgggattaaaggcgtgagccactgcatccagccataaaaaaaccctgtcttgatggaagttctaatgagaaagaataagcattctcagatgtgggtggccattggactttagttggtttatctctggccctatatacaacataaagaaagggtcaactttgacatgacaattaatgagttccatggccttagtacatggccatttcacagaagtgaacaaaaaggacagctgcttttttcttttatgttaaatgcagcaaaatgtatgtcagaacatacctctatttgtgtattattctagatatagtctatagagcaaataagtttatatatctattaaagtttctctctttttttttttttctttttgagacggagtcttgctctgtcccccatgctggagtgcagtggcacaatctcggcttactgcaacatccatctcccgggttcaagcgattctcctgccttagtctccctagtagctgggactacaggtgaccaccaccacgcctggttaattttttgtacttttagtagagactgtgtttcaccatgttggccaggctggcctcaaactcctgacctcaggtcatccacttgcctcagcttcccaaagtgctggggctacaggtgtgacccaccacacacagcctaaagtttctttctatattgcaattagtaccaatatttaccaatacttccacattctgtatctctattctttttaaatatgaatacaaagattggcacatcaggatatagatatacataagtaaatagattttaaaaacttacaggattatatgagtatgtctatgtaaatatttatgtataaaagaaatgttccccaaaagatcattttcaatctcttaacatatactaatgatgcaagtatagaattacttccaagctcctttgcacaacagaatttcagaatggaacatagccattcaatattgtttatataagcataaaaataccttcaccttcagtagcataggcctcagaaataagctgacagcaaagccatgttatacatgctgctttgatgaagctgcagttgttatttgaataatttcttgattggatctacctgtgcaaaactaattggattattggaataaactaagctgagctaattggctaattggatattcctgaactgagctaattggctgattgaaatcacaaggtttcagctaattggctgattggatttactagaacttagctaatttccttattaaaatcacatgagctaactttcaggttagaataacctaggctaagctaatcagcccattagattcacctgggctgatctcatgggctgattgaaattgccagggctgaactaattggctgtttggaatcacctgggctgagctaatttactgattggaattgcctgggctgagctgattggctaaatagaatcagttgggctgagataattggctaatggaaatgacctgggctcagctaattggctaattggaaacactcgggttgagctcatcaaccgattacatttacctgggctgagaaaattggctgattgtattcatctatcttgaggggcatgagtagggacataacctctgacttacttttcatttgtgagtttcttacaaaacatagtcacaaatgaacattacatacacgtatttctatgaccttgtgtctttgtatatgtttatctttttatttttgagactgtcttgctttgtcccccatggtggaatgcagtggtgtgatcacgactcaatgcaactttttcctcccaggttcaagtgattctcgtgcctcatgagtagctgggattacaggtgtgcaccaccatgcctggctaatatttgtatttttagtagagatggggttttgccatgtgttcaggctacggtcttgaactcctggccccaagtgatcaactcgccttggcctcccaatgtgctggaattacagacgtgagccagtgaacctggatgtgtatgtttatctatctacatacattatatctgtatttaaatgtacagaaaaaaagtgtccaaaaaaaccctgaagtttgctttcagtatagcagtctatagtcaagtcccagacctcgtgttttattttcttacccaaaatgtcactaagtaagattttgcatttatggaagtttttctttacattgctataaatgcaaatacttatttatcctttgacctcctatatctttattttgtatgcaaatggaaaaaatgatagatctgtatatagatatacatgagtagataaatatgaatatagaattatatgagcatgcctatgtaaatatttatatatataaaagatattaatcaaaagacattttaaattccctagcctacactgaagatgcagatgtaaacctactctaacccatatggatccacaccatctcagactggaacacagccatacaatgttatgtttaaatatcaacaaagcttcacatttaggtgcattgcctgggaggtaagttttcggcaaaaccatgttagactctagttccagcttagcatttcagggccctgcttcctttctcactgtaaacctatgtgattcacatttgccatttggggtctgcctggatgcctgcaacttcctaatttagctaattgacttatatcaacctgagctgatctaagcagctcattaaactcaccttggctgcagaagctggaaagaaaaatgacctctgacctacttttattctgaggcttccctacaggacatatgcaataaagatcattacgttgatatacctatgttacccattttctgtgtatatgtttatctagccacctatcttatatctatatctatatgtacaaaagacagccaacaagagtaggtcagaggtgatatttatttttttcccattcaggccaggtaaattcaatcaaccattagcttagtgaagatttatcaaattcaagccatacagcaaatcatgcttttttttttttttgagacagagtctcaccctgtcacccaggctggagtgcagtgggtgcaatctcagcttattgcaacctctgcctcccaggttcaaaggattctcctgcctcagcccccagaatagctgggattacaggcacccaccaccgcgcccagctaatttttatatttttagtagagacgggatttcaccatgttggccaggcttgtctcaaactcctgacctggtggtttgcccacctcggcctcccaaagtgctgggattacaggcatgagcaaccacacccggcctcaaatcttgcttttttaatgtaaaaatgtcctcattacacagcaccagggtgtttttaactcggtctcatcaaactggcccatgggattctgtccatccagctagaaacattcagacatgcctgacaccagtgggcctaacctttttcacaaaggagctttggcctggccaaaaagaaccacctttggtggttcagtgcagtgtcactatcacctatttgaaatgtagccaggtaacatgtaccattatatttgctttcagtatcacagtctatcttataataagaaacctaggctttctttccattaccataaagagcctattttagccacaaagacaaaaagaaaagtgttttcacatcgcacgctcatggaaataaacaagagtccctgtcttgatgaaagtcttaatgagaaagaataaacattctcaaattttggtgagaaactttggactgaggctggttcaactttggccgcatgtgcaacagaaagagaagggtcaacattgacatagcaatgaatgacttccattgccttagtgtatttttatctcccagaagcaagaaacaagaaaaaatccttctttaacaatatatgttaaatgcagcaggatattggagcatatttttatttgtgtaattctctagatcttgtttaaagggcagataaatttatacgtgtatgaaagttcctttttttcttttttttgaggcagagtcttgctctgtcgccaggctggagtgcagtggtgtgatctcggctcactgcaacctctgcctcctgggttcaagtgattctcctgcctcagcctcctgagtagctgggactacagtcatgtgccaccatgcccagctaatttttctatttttagtagagacggggtttcaacatgttggtcaggatggtctcgatttcttgaccttgcaatctgcccacctcagcctcccgaagtgctgggattacagacgtgagccaccgtacccggcccttgcatttcttctcagtgtgtgcatgttctactcacacccaccattttggtcctgccttgataaatccaaagtcgttatttagataattggctgattggatccacctgggttctgcgaattggcttactgaatttaccttggcttcaggagaatacggagatgacctttgacctacttttttctgaggctttctttggagacctatacacagatgaatattatgtagacgtacccatgtgacttattttgtgagtatatgtttagccacctattttatgtctaatgtatatatgtacagtaagaagccaataaaataaaattcatcagaggtgatttccattatctttacctacaggttaggtaaatccagtcagtcacttagctccgaaaagatttattcaatccaagcaacacaccacgtcactttttttcatacatttaattatttccttgataacctggcacctgggtgtttttaattttgggtttcatcaaaccagctcactgaggttctgttcatctagagaggaactgccagaaatattcactagggggcctagccttcctcacaaagaagatttggcggggcaaataagagccacctatggcgctttagagaatgttcagtattacctatttgttttattgggttttgttgttgttgttgttcttgttgcttttttgttgttgttcttttttttttttttttttttgagacagagtctcgctctgtcgcccaggctggagtgcagtggcgctatcttggctcactgcaagctccgcctcctgggttcacgccattctcctgcctcagcctccggagtagctgggaccacaggtgcccgccaccacgcccggctaattttttgtatttttagtagagatggggtttcaccgtgttagccaggatggtctcgatctcctgacctcgtgatccaccctccttggcctccaaaagtgctgggattacaggcatgagccaccacgcccggcctcttgttgctttttgaggccatcttggttggccacccaggctgaagtgcagtggcacaatcttggttcactgcaacctccaccttctgggttcaagtgattctcctacctcagcctctcaagtagctgagagtgtaagcatgagccaccatgccttgctaattttttttttttttttttgagatggagtcttgctgtctgtcccagtctggagtgtagtggcgtgatctggactcactgcaagctctgcctcccaggttcatgccattctcctgcctcagcctccggagtagctgggactacaggcgcccaccaccatacttggctaattttttgtatttttagtagagacggggtttcaccgtgttagccaggttggtctcgatctcctgaccccatgatctgcccacctcggccttccaaagtgttgggattacaggcgtgagccaccacacccagcctttaggaccccactctcatactcactgtatgtctgtgttattcatatcagccatgttgtgatgtggcttgacaacatcacaaaatgtgatgctttcacttttccaacttagctaattggctgatcatatctatctgggctgagaggattggctgattgattaacctgggtggagctaatcagcttctcgaattcacctggtttacagttgtgaaggaaaataacctcagacctacttttttcctgaagctttttgccagacgtatgcatatatggagtttgtataaacataaccaggggacccattctgtatgtttatccaccaatcttatacctgtatctatatgtattaaaaaagcccccaagaaaaaaataggtcaggactcaacaaaaaatggtatacagaaggcagaattagatcacagcttccactcagacacacagagcagcgtgttgagactcgcatcatgaacttttcctccagaactactgcagaaatataccagaaaagccaagaaaatccacaaaccctctgaaaaaagcagatgctcctgcagggcctgggagactgcccaaatgctgtgaatgcccaagctgtgaaagtaagaaagggggattgtttgccaccaaacacacactttcactgaaaaacctgaaggtctagatcacagaaaaagaatttgaccttacctggagccgaatcaatttagagagctgagcaaaatgcaggagtagaagcagcagccagaaaagacctgtgggctctctaggtcctccagaaaacccagttctgatctattttacaggggtcattggggagggatgccagaggcactgggaaaaggccacaggaagaagaaaacctccagctgaactttgtaacaattccaactggacacgaagtctcctggccagaacatgggaagggtgtgagtccggtgtgcacacatgacaggcggtaaggtgtgaaagtcctgcttactttctcagttggaaggctgggagcctgtggcaagttctcagccctacttacccactgcctggaaacagacttggtgctgttggaggtggcacggtgagagtaagacagaccttttgggttgtacggaagctgggtgaggcctgtaactgctggctttcccccatttctctgactgacaacctgaatgacacagcagaggcagccataatcctcctgggaacataactttgttgacctgaaaaccacacccccactccccatagcagccacagcaagccctgcccaaggagagtctgagctcagatatgcctaaccctgcccccacctgatggtccttccctacccaccttggtagctgaagacaaagagggtatcctcttgggagttatggggccctgcccactgcctgatcctccttttattaccacagctgatgctgttttgaaagcaccaccttttgtcaggagcacaaaaatagtacattaaacaaccaaaattaagaaacatcacagagtccattttactcccctgccacctccactgaagcaggtgctggtatccatggctgagagacctgcagatggttcacatcaaaggactctatgcagacaagccccagtaccagccctcagcctggtagttcttctaagttgctagatccagaaaagaaataacaatcactacagttcagctctaagaaagccacatccctaggaaaagtggcagagtactacatcaaggcaacaccctgtgggacaaaaaaatctgaacagcagtcttgagccccaggtcttgcctctgatattgcctaccaaaatgagaagacaccagaaaaacaactctggtaataggagaaaacgaagttctttaacaccctccaaaagttacactagctcaccaggaatgaattcaaaccaggaagaaatccctgatttacgtgaaaaggaattcagaaggttgattattaagttaatcaaggaggcaccagagaaatgcgaagtccaattttaaaaaatttgaaaagatacaagaaatgaggggagaaatcttcagtgaaatagatagcatacaaaaaacaaatcacgacttcgggaaataaaggacacacttagagaaatgcaaaatgtcctgaaaagtctcagcaataaaattaaacaagcagaacaaagaacttcagagctcgaagacaatgttttcaaatcaacccaatccaacaaaaacaaagaaaagataattttaaaataataaagcctccaagaagtttgggattatgttaaacaaccaaatctgagaataactggctttcctggagaagaagagaaatttaaaagtttggaaaatatttttggtgtaatgatcaaggaaaactttctcagccttgctagagacctagatgtcaaaatacgagaagctcaaagaacatctgggaaattaatcacgatagatcattgcctaggcaaattgaggtttttagttttctagtaaattagccattaaaataatttgttttgttctaatattgttgtattcttctgaaaacaggtacaaacccatagttatacaaacacacttactgcatgtttttacacctcatgtttgtcttcagagtaatatatgtatatatttaatcctacttaaatcaaaactaaaaatctgtaaatttttgcaggcagagtgtccacatgttcaaagaaaaatatgtaacaagtttttaaaaatatttaggtctcagatatgtatggattttatgtatacttgtatataatttttattatgaccgtaaaatgaccctgtagtcaataacaatttaattgtacattttaaaataactagaagtgtagaattgaattgtttctaacttaaagaataaatgctgcctggcgcagtgactcgcgcctgtaatcccagcactttgggaggccgaggcaggcggatcatgaggtcaggagatccaggccatcctggctaacatggtgaaaccccgtctctactaaaaatacaaaaaattagccaggagtggtggcaggcgcctctagtcccagctacttgggaggctgagacaggagaatggcatgaacctgggaggcggagcttgccgtcagctgagattgcgccactgcactccagtctgggtgacagagcgagactctgtctcaaaaaaaggaaaaaaaaaaaaaaaaagaataaatgctggaggtgataatccctcacttaccctgatgtaattatttcatattgtatgcctgtatcaaaatatgccatatatggcataaatatatacatacactatatgcccacaaaattttttaaaaaatttaaataagaaaaaaaataaaaacttaacctatgagaacaatagtctctcacttatttgcagattaaagccactgaaaaaatagattactagagatgttattccactatgttactaaataatatactgttaccatgttttacctacacccttgagtaaggtgggataggttaaagttagtggcataataacacttcattgagtgcacaataaaattaacatgttaaaaaatgttacaaaattaagttcacatataatctaaaaatttttaatataccatattttattacatataagcacaattataatgatatactactaattttatttttaattttaactaaaatttaaaaatgtttttctctcactataatgcacaagaatattacttagaaacctacctcatacactacttaatattataagtcaaccacaaaaagcctcttcacttagattttcatcatgcatcttatattttaatatccttattcttttatggaaaagttcataaataatgcccacttaataaaaataatctctcatatatctgatgcagcaattgatcacatgctttcacatgtgaatacaatagaaacaaagagcagaaaataatttgagagttcaattgcatcattatttgcttttcaaaaagtctgtattttttcaataaaaagtatacttcccatgtaattataactctacaaaaaatctactccttttaaagttatatacaaaaaacttatctaacaattttagtttggaattattttctatactcaacactctgatttagtgtaatgtctgacatttcagtgccttattattactactgtatattctctggtactgacatagacttaattttggataaaatactctatatttactgtatttacaaaaaaaatcttagtatacactctgatgttttctaagctgtagttttttaaaaaatggttttccaaattcattaaatttgcagggtatttctacagtataaatttcctggtgttgaataaagtttgagcaactgccgtagggttttcctctagcacaaaatgtatacaacaagatctgtaatagaattaaaggcactaaaaccctttttatatttgtaatgttcgttcatgttcaaaattaatacactttttttttttttgaggcagagtttcgctcttgttgccaaggctggagtgcagtggcgtgatcttggctcaccgcaacctccacctcctgggttcaagcgattgtactgcttcagcctcgcaagtagctaggattacaggcatgcaccaccatgcccggctaagttttgtatttttagtagagacaggctttctccatgttagtcaggctggtctcgaactcccaagctcaggtgatctgcccgcctcggcctcccaaagcactgggattataggcatgagccaccgcacccagcccaaaataaatactattaaaggtttatatattctgatagatcttttgacagtaattgcattgttaatgctttaagtatgaactccgtgatgttgagtaagatgtgagcagatatgaatggcttttccacattttttatattagtataatttttctcaagaataaatgctttcctgtgcaataagatgtgagcactgagccaggcacggtggctcacgcctgtaatcccagcactttgggaggctgaggcgggcagatcacctgaggtcaggagtttgagaccagcctgaccaacttggagaaaccccatctctattaaaaatacaaaattagctgggtgtgctggtgcatgcctttagtcccagctactcaggaggctgaggcaggagaatcgcttgaacccaggaagcacaagttgcagcgagccaagatcacaccattgcactccagcctgggcaacaagagcgaaactctatctccaaaaaacaaacaaacaaacaaacaaaaagatgtgagcattggttaaactttttgtcgtattctccatacttgaagaagttttctccagtataaattatcttacaatcaagtgtgacaagaatttaaaggctttgtcacattactcacacttctactgtttcttactagtatttcttttatttttagaagtttgaggtgttttcaaaaacattgtcacatctttcagatttgtagagtttctctccagtatggtttgagaacttattaaaagctttgccatattcttcacatttctagaatttctctccaatatgatgtatcctatgtgtaataagggttcaaaagttaaagcctttttcacattcttcgtattcttaggctttatcttctgtataaattctctgatgttcagtaagagttgaagaccaattaaagactttgttacattttttcacatttatagggtttgtctccagtatgaattattttacgttcaataaggtttgaggactgattaaaagcattgccacattcttcacatttgtagggttttctccagtataaattttattatgtctagactacagagctcatggtcagattaacccatatatgagctctccctgccacataaagatgatctttactgaaaaggaacaaattgttcctcaactgaaaaaggacattacccacaaaaaaaaggtgtcccagaagaaactgaagaaacacaaacttatggcctgtgagtaaattcagcattaaaataaatgcaattaaaaaaagaataacaacaaaaatatttaaaatatcaataaaccctagaaattatggaggtaaaaatacaaagtgaaataactgaaaatttttaaaagtaataaaatgtgatgtaaaaatgaagaagctcaacaaacaaactaggatgcacacaaagatatttctttcttttttttttttgagacccagttttgcccttattttccaggctggagtgcagtggtgcaatcttggctcaccacaacgtccgcctcctgggttaaagcgattctcctgcctcagccttcttgagtagctgggattacaggcatgcaccaccacacccggctaatttttatatattttttttagcagagacgaggtttctccaggttggtcagctggtttcaaactcccgacctcagatgatcagcccgcctcacctcccaacgtgctgggattacaggtgtgacccactgcacctggccacacaaagatatttctaacaaacatatatatataggcacaatttttaaagtcacagacaattagagaatcttgagagcttcaaggcaaaagtgatgtgtcatttaaaagcatagtctaatgagataaccagtaaatttgtcgacaaaattttgcaggttaggaggaaactgtgtgatgtagtcaaagtcctaaagaaaatagttgtcaagtgagaataatgctatcagcaaaactgtcctaacaaataaaaagaaaaagaccttgcaaagtaaccaaattcggaaaaagtatattggcatttcatatgccctacatattaaagatgctgaaatgagttccttccactgaaaagaacatgatgaaggagaacaacacataattttataaaaatacataactttctaaaaaacttacacacatacacaaaacagaattccttagcattatcaaaatggtggaaaaagcacttttagtgtctaaaatttgaaacataaaagcatagaaattatggtaaacacctgttaatgaatatgcaacataaaaagataattagcaacattaataacaaggtttagggcacatgtaatgaggaagaaattttacaggcaactaaagttaattttttaccagattaaaatatattgttgtatcttttaaaggttttatgtaatctccaaagtaccatagaaaaaacctgtatagactacagcctgtagctggtactacaggcacatgccacccgcccggctaattttttttttttttctgtatttttagtagagacacggtttcaccatgttagccaggaaggtctcaatctcctgacctcgtgatccacccaccttggcctcccaaagttctgggattacagatgtaagccactgtgccctgccaacaataatacaataatagatttatgcactgggaacctatgacaaatttgtacataagtttgtgtgtgtgtgtatctcatattagggttctgaatatataaagcaaatattgaaagaattgaagaaacacatagagagcaacataattatagtgagatatttctataccttgtgttcaataataaaaataagacaaagcagaatattagtaagggaacattagatttgcaggcagtataaaacaatgattcctaagaaaggtatagagaatactcctcaacagcataggacacacaccctttgcagtagctcataacattctctttgatagatcaccagttaggtcaaaaaagaagtcttaacacatttttaaaactaaaattgtgtggattacttcttataaccaaaattgaataagaatatataaacaacagaagaaacctgaaaaattcacaaatatctacaaattaaacaatacactcttgagcatgctcttggtgaaaagttgaaataattaatattgtgaagatgtttatactgcccaatgtaatctacagatttaatgcaatgtttttaaaatttctcattgcatttttaaagagacaaaaacagcaaatgcaaaagtatatgaaattgcaagagacaataatgtaccaaaaaatatttttaaaaaaacaaatcggaggcattacagttcctgatttcaaaaaacattataaagctaaagaattaaaacaatttgaatgagtgtaaaggtaaaaaaaagtagactaataaaataaaatgcaacacatacataaattttcacatatatggtaatctgaacagttatttgcatacccatagttattgaagcattgttattgtaagccaataggcaaaagcaatgcaaatttctgtcaccaaatcattcagtagagacaattagaaagataaatacattgaaaattcactcagttttcaaaaataaggaaatattctaacaaatataaacaaatataacagatctctgtgactatgtctagttagttctcaggaccagttaaaagctttgttttttataacaaatctctggcccagcacccaggtgatgtgactctcgtgcttgctacctacacaaatgtggatttgttacatatatactgtcccatctcacaagtaatatgatgactttcatatcttgaaccagccagttgctgagatactgtctcccaaggctaggcttagggatatgggtgtgatcgtgggtctcctatttttctgcaggtcagaggggattaccacactctcacatatggtataaagccattgaattgtacacaatgtgtcaccacagagcccagcctacaggtgaagttgacttgcacatatgcacaacccatcaaccattaaaattgtaaccctcacagatggatagacctcacttgtgaatcttacacatggatgcagttcacagttggatttgtgactgtcatatgtgagcatctggccagatttgtgatggcgaaacatctttaaatgcagcttataagaagatgagggctctcctatctggacccagaacattggagagatgttgcctctcctacctaggtttagggacacagatacaatcataggttcataccagcaagaaagtctcagactagattgtgactctcattcaaactgtataaagccctagacccaacacctaggtaatgtgagtcttctcttttacctgggcctctcatattttgagtattgtgacatattgctaggcccaacacctagggtatgggaggctcttgcctaaaacttactcacagaaagccttgtgacatatctctgcatacattacctaggagatgactttctcctgcttgcaccctacccataggagaaattgtgacatattactaggagcagcacccaggtgatgtgactttcctgcctggtctctgtcctcagggaatgttgagaaatatctctagatccaaacccacatgatgtgactctcctgcatgcttcctatccacaggtggaattgtgacatatgtctttactcaggtaacagatgtgatgatgaccctcattcctcaaacctgccaataagagaaatactgtcttttgtaggtagacttagaaaaatgggtaagatccttgggtctcctctttgtacaaagatcatggaggcttatcactctattgcatgtaccataaagcactcagcttgtactgagagtgtcaccacagagaacagcacacaattgaggttgtgctttacatatttacactgtggcagtcattaagatcatcaccctcacacatagaccgagcccactgaggaggtcctgaatcccaaatgcagacacaatctacagttgcaattgtgacagaacattcagcctctgttaagatagtgattcattcctaaacccaaatcataggtaggtaaagactgttctatctggaacccaccaataggagagatgttgaccctcatacctgggcttaaagccacaggtaaaaatcacaaatccatactagtatgaaggtttcagaatagattgtgactctcgtgcataccacataatacccttgtgtggtacagagagtgtcctaacagggcccaggagtcagatgagattgtaatacgtgtgtgcacatccagctgatagtaaaaattgtcatcctcccacatgaacacagccctcttttgaagttcttaatttcataccctgtggcagtggaaagttggaaaattgactatcatccatggatccaatccacaagtgggttggttaatctcagacattcagcacacaggtgaggctgtgaatcctcaaagaggacacagtttgcaggagggattgaggctgtcatgtatggacccactctctcattgagattgcgtgactcctgtttttagagccaacatacaggaggtgttgactctcgtaaataaaacctagacatgttcaagattgtcaatcacatccctggaccttcctaggtgtgattgtgacataagcctctgcccgggaccttaataatttgactctcttgcttggggtcagacaacagataaaaacatgacacatccatggacccagcacctaggtgatgtgactttattcttttgctgtggctccacccatagagagcattttcacatatcaaagtgctctgtagacaggttatgtgactcttttgcctgtgtccagacaacattggccactgtgacatattgcagggtccaacacccaaaggaagtaactcttatgactgggttctatctacagagggcactgttacatatttctgtgctcatcactcagttgatgtgactctcctcttctgcctgggccatgccttcaggagagtgggagatagggagagtgacttattgctaggcccagaacacaggtgatgtaatacttcttcctggtctctttccacaggagttactatgatatatcattaggcccattacctagatgatgtgatactcctgtttttttctgcaacttgtgcacagtgtggattgtgaacttggcttagcacctacatggtgtgactctcttctcatgactaggtcttatcactgggttggttgtgacatagagctgggcccagtcactaggttatgtgactctcctctttttcctgagccctacccacaagaggacatatttctgggccattcatcttggtgatgtgaatctacttcctgggacctcccctcaagggatattatgaaatattgctggacccagcacctagtgatatgactctctgcttttgcgtgggcactgcatacatgtgtaatatatagctaggttaaacacctgggtgatgtgactttcctgcataagctctgttcacaggaatgttatcacatatcattttgttcatcacctaggtgatgcgactctactcttttcctgagccctgcaaaaaggagagattgtgacatatcactgaactgagcaccttggtgatgtgactatcctctcttgctcaagtgtcacatattattggtattgtgacatacctctgtgaccaacacctatgggtaggaaaacttccacccagactcagcccaaggggccctcatcacttttttaaaagatatgtgacttgaaaaatgtgactgtcttctgcttataccctgccctcagggaagattgtggcatattactgaactaagcaacctagtgatgtgtctcttctgactggggtttgcccacagagacaattgtgacatatcactgggccctaggtgatgtgactctgctgcctgttcccaacattcaagagaggattgtaaatcttcctggccaagaattcaggagatttgactctcctttcttgtccctgccctcaaagaagattatgacgtatcttcagccccaaacccaggtaatgtgacttccctgtttactctctcttcaggggagaaattattacatatatcctggcccagctcacaggtgtgatgacagttctcatacctcaaacaagtcagtagaagcgatactgtttcttatagctaggcttaggaaaacttataaaatacctgtgtctcctctttatatgacggtcatagagaactaccatgcacttgtatatggtataaagctcttgagtggtacagagagtgttcacatgtcccaaaacaaaagggatattgtgtttcttgtatacacacccagacacctgttaggattgtcaccctaacacctggaaacagcccattggtgaggtcttgtgtctcacatgcagatgcaatccacagtttgattcctgactgtcaaatgtaaacacctgtccaaagttgggatggtgactcatttctagacccagctcatagacaagtgaggactcttctgtctgggcccaattaatttgagaaatattaacttttctacctgggcctagggagcagcataaaggtctcagggaaaattgtgactctcattcctagtctacgatgatcttgggtagtattaaatgtcctaacggggttcagcgcacaggtgagattgtgacagtgatatccacacccaactgacagtaaaacttgccatctttcctcatggatacagcccactgttgaggtgttgaatctcataaccaaaggcagttgaaaattaaaacattgtctctcattggtagacccagtccacaggggggttggtgactctcagaccaaaattcagcacagttatgaggccatcactccactaagaaaacggaattcatagaaaaaattgagacgctcatgcacaaatccagcccaccactgagattgtgactcatttgcttagacccaaaatataggaagcgttgactcttatacctagaattgggacatgtgtaagattgttcatcttttcctcagactttcctgcaggagtgatgctgacatgttcctctatttggcatctgagtgatatgactcttgccatggtctagcccacagatggaattgtgatgggttgctctacccagcacctaggtgatgtgactccatttttctgcctcggcactgtccacaaaaggtattttgacatatctctggggtatatacccaggttacatgactctcctgcctgtgcccttttcacatattatcataaaatattgctgggtccaacacccaggtgatgtaactctcatgcctaggacctgccaacagggggaattgtgacaaatctctgtgccaataacccaggttatgtgactctctttttttgcctggtccctgctcacagggggcattatgacatattgctgaactcagcacctaactgatgtgattctcctttctagtttttgtccacaggggagattgtgacatatcactgggcctcaaactaaggtgacgttacactttcatttttgaactgtactcagaaggcattgtgatatattcctgggaacagcaccaaggttatgtgagtctcctgcctgcactttgcccacaaagggcattgtaacatatatttagacctatcaactattcgatgtgacttcttttcttaacgtgtaagcaagttgccccaaccatggagggggtcgcggtggtgacggcgggcagcgtaagcgctgccaaagccgagggagctgcagccttgccgcctccgcctcctgtctccccgcccgccctcaccctcgcacccgcagcgggtgaggagggaccggcgcctctgtctgagactggggctcccggctgctccggctcccggccccctgagctggagccagagcgcagcctgggccgcttcagaggccgcttcgaggataaggacgagcagttggaagaagaagaggagctagaggaggaagaagaggaggaggaggaggaggacatgagtcacttctcgttgaggctggagggaggccggcaagactcggaggacgaggaggagcgcctgattaatctctctgagctgaccccatatatcttgtgttccatttgcaaaggttacttaatagatgcaactaccatcacagaatatctttataccttttgtaaaagctgcgtcgtaagacatttttactacagcaacagatgtccaaaatgcaatatagcagtacatcagacacaacctctttataaggttggaccgacagttacaagacatagtgtacaaattagtgatcaatctagaggaaagagaaaaaaagcaaatgcatgatttctatcaagaaagaggtctagaagtacctaaacctgctgttccacagccagtcccttcaagcaaaggaagatctaaaaaaatccgagaatcagtgtttcctattccacctgaacttgatatgtctttattactggagttcattggtgctaatgaaggcacgggacattttaagccattggaaaagaagtttgttcgagtttcaggagaagcaactattggacatgtagaaaaattcttcagaagaaaaatgggtcttgatccagcttgtcaggtagatatcatctgtggtgatcacctgttggagcagtatcaaactctaagggaaatccgacgtgcaataggtgatgcagcaatgcaggatggtctgcttgtccttcattatggtcttgtagtttctcctctgaagataacttgaagattctaggcacattatgaggagggaaacaaaggaggcttctgcaggactgcatctcaccaaagatttccatgaaatgtaattgctaccactttgctgttcaagacataacttacctatttttagcaccaagaattatagcatttataagtacaacttggaacgatggaatgcatctgttactagagactgtatataaaaagcagcgaaagctcaggggaaatttttcaaaaattgaattttaaaatttcttatgattttaaataccttgacattgattttgcttcccatctttgaagtaattggttagttttctttgttcagccatttcaagttggtggttgggatatctgctctctgggatggcatcagttgggcagtcatccttttggaagagaagtgtgcttttgaatggaagatccaaagccagtctttgttaaactgcagggcgtactctcaaagaccaaaactattggccacttttgtatgttgccagcatattttgaacttgtatctttttttatactagcaacactacaaaggagaagttactcatttcaaaatggatgaattgttattatgtgtgaagagactctgagtttatggtctgtgccataaactttcagtgtaataagacttcttcaatacatcttccaataaggggtgcttctttgtgacagtatttttatttctgacattcattttatttgggtacatagtgtggttgttgataccttgcaaaagtattgcttctgaaagtaataaaaaattttaggagaatttgagaagtttacagaattacttattcattgttttcttggtaagtcagtttaatgtttatttttctcattatttcatcactggaataaagaataagggtgtttgagctcacctccatgcaaagacttcagttttaaaacattattttgcctaaaattagcattgtgatgctctctaaaagaaatattttataaaccctgttcacagcagaatttctgaatctgtatagagactactacaaaattggacaaagattggcaattctttgtaaagaatttgtgaactgtgtataaatttattctaacatttaataaaaatgtatttaaacctaaaaaaagaaaagaaaagaaaaactgaaaactcgattgggtcagatatgtcatttctattctatactttttttctggaagtagttccttcctctcctgatgcagagggaggctggctgggggatcctgggcccctctgtcctccccgcggtggcagtggctgatctctgctcaggtgtgaggggtgtggccatgtgctgggcttgagcctgcccggcccagcccctcctcacttccctggactcttcacggtgtccacaggcccttacacaatcttgagcatccctctgatggaaggggaggtggcagcagaaagccagtgggagaaactggccccacaggtcaaggagggcttgcccagctgtgggaaatgctttggttgacctcggatttctgtgcgccaagctgagccccaatcctggctttgagtccaggtgtcctcgggctgggcgaccttggccgtgggcgctctggctgctgcggtggttcctgctgtgctcggctggatcacaactggaactggtgccctccagaagtgaaggaggtgccccgcaggtgggaggaggcagtagccatggtccctgtaaaccaggccttgctgacaaatctcagatgccaagaacagaagaacggagagcttctgccaaatgaacaaactgttggagcgactgagtgtgaagctgcccaaactcctcaaagtggagcagtgaagcaaacaccagagaaggacaagaaaaatgaaagtcaaagaaaatgagcagaaaccaaaggcagatgctaatgcagtgcaaagcagttcacaccatgatagaaagagttgatgagtctcggaaactaatcttagtgacagagtgaaaggacagcagtgaacatggtaaggtgctgacgattctggtccactggatcccaccatccctaggacagtaaataccatcacagtcaccacacagcgagttacaactgcaccatttcctgtttattcctaaatgaataaaggtgattctcatcacaagtgcaaataaaaagttatttatcttttttttaaactaaagtgtcttgctttagcttttttttttttttttagttcttataattttgaaaatgaagttgacatttgtatggcttatgaaattttcaatagtcttgcattagttgaattgttcaaagtaaatatattttaaactaagaagagtaaactgtgtgtatttgttttacatagtaaaggctgaaagtaacaaatattatctgtttatgatttgaaaatttcaaagtttgattatttatccatacatacacagaatagtgtatcgtgctgaaacatttgtgttttaaagtggcagccatagttcctgcctgtctggatatattttggacttttgtatgttaaatacaacgtaaaaagactttattgtgctttagaaaatctaaggttggtatacacaaacaaactttacaaattactgtagggttcagcaaactgtgtttataatgtgacattaatacctctacattttgatgtgtaaatctttcttgagaaaagattgttttttaaaaaaatggctacaaattcaggcttcagttataaaatgacaaaatagtaaagaaatgagtggtttgccatactatatgaatactggcattcaattaaaataccaaatatgttaatgaaaaacttttagacaatagatttaaataatttcttgatattttactacagtaataaatattcacaaatattttataagtcatatctattagtactaggttttacttaatagtagtatatatataagatcaaaaatctgttaaaaatagatatgcttatcaataatttggtgtttctaaatacccagaagtcttgttttaatcagattagctctggggatagtttactaatttcattttatatatggtgtgttcaaagttttgtagttaaacctaatattgattgatgatgggtaaacaaatctttttttgctaattccataggtttattaaattgttgaagatgttgttaattaaaaaattccaactttcaatgttgtttacagggatttaggtctagtttaatctgctcaacctgttaatcagtgtcaggtgccggattccaatttattttcagtgcgtttgtatgacttttgtttttttttctttctttttttcagacagagtctcgcactctcatctgggctggaatgcaatggtgcaatcttggctcactgcaacctccacctcctgggttcatgcaattctcctgcctcaggctccccagtagctgggattacaggtgcacaccaccacacccagctaattttttgtatttttagtagagatggggtttcactatgttggccagactggtctcaaaatcctgaccttgtgatctacccccttcagcctcccaaagtgctgggattacaggtgtgaaccaccacacctggccaacttttctttctttagtctttgaataaaacgtctattaacaaagacaaatttctacacatttatcaagttccttttagtaactcaaaaggtaatatatccaaaattctcatgttattgtctgagaaaacagattctactgttaccaaaaaatcaactggaaggcatttttataaccttgcaccacataagaaaaaaactgtaatgcagtagtaataagtgaagatacatcaaatgaaaaatggtaattgagaaagtcactttcaatgtttgagtatttggactttttgtttaaaaaaattgtagtaaaatagagcttttggtaagctttctatagattaacattatcataaattaggaaaaaaacctttaaattgtaaataaacaaacaaaaaaacaacaacaaaaaacaacaacaaaaaactaagatccaggactgcatacatattgatccttattttgggagattatgaaacagaccattgcatgaactttatatagataccttgccacatgggcatactaataaaaatcattatatttaatttgaatgaacatgtccacatcttaaaaatactgctttgtactatgaatgataaatgtaaaagtttttatacacaagaggatcctgattcttaactgaacatatatggcaacccatttctatgtttcttctgaactgaagcctgattaaggcttaaatgtggaatgagagggactcaataacaggacatgtggaacaaaaacaaaaaaatgagataggttggtcatttctaagttcaaattattaaataaaatattaaattcttgtcctaagtttttttctttcaaaaacaaacttgaaaactgttctaatccagttttctttcatgaagggcctactcattgtgtggaactgaaaggaggtcctagggctactgaaggttcctggctgagtctatacctcaatgttacctaaaagcccttggactaactccagtcctcaacagccaatgagggtgttggcacaagaacttccagtctttttttatttcatttcatttcatttcatttctcttgttcttgttctttttttttttttcatggctatcatttctcctatccgttctttgtatgcaaagttgtgaatgtttttacagcctatggatataatcgtgctgagtaaagtcagtcagtgtcttggtaatcaaatatgtaactcaaaggtgttgttttataatttcctagcaacagagtgaattcaaaatctctctaaatttttacttagtaaaggtctttctctcccccagtaataaacattcatggcactgtatgagagaatatttcactctgagttaataccctcctttgcatttcgttttttccctccatgtgaaagctgagcactgtccaatgtatctaaacagttcctatatgagacaagttcattttttttgttctggggcatatgctataggaacagcctatcaaaccccaaacctctttctaacttttgcctaaaaatataaagttggagtttttacctagcatttctaattttacagcacccctagtggaatgggattgttctccatgtgaagacttgccaacactctgtccaaaacttacagttccccaattattttcccttttacatccctttatcagtgataagtcctcatgccctatttgtaaacagaaaaactcagctttcaacagccagaagaaaggctttctaacaaaacaaatcttcaatttttacacatttttaaggcacctgttcttcatcaaactacattgaaatttaaacagaaaggaattttatgtttgaaagtaaactcgtcccattctctgggattctgatgttttcctggggccgtagtaagggaagccaaaaatggcattagggcattccctctaaaaaagtatcttgcctaaatccaactactgcataatctctccccagccactggagtaccttgagagccttttgcgctgagtgggtctagaaaaccagcaggatggaaagctagggtcttgagaaggtgagcacaatctgtcctgcctatgaactcctccggaaccatgggtaaaggtcatgcttccatccatgggtaacatctatgatggttgctgggacacagaggaaaaaaaggaaggttgagaagtggtatgtcctttttctctttccttccaccctaggccacactgaaaagagaaaggggactgaggaacgccttgtctcccctctttctctagataggtaacaaaccatcgacagtctgcattcccctctagtgcattctgaaacactggaacttctttaaccctgaaattctaaagaaaaagtggcttatattctattgcataaacccatggccatcttagagacagtaggcctggctttctaagggaagcattaatttcaacactgtccaacaaatagatctttctttgccctgtgagacaacccagatctttgtaagcattgtaaaattaaatctgccttcttggcagccatatcagacaagtctacaacatataattaccaaaagttgagatacaaacccttggggaacactcaaatgtaacttccaggtgccccagcagcctcacatattttgggcccccaatacccatatatcatcagctcctctggttgtgccactgaagaaacccacaacattgctgttaccccctacagaaaatgcccagtagacatggtgttactagtattcaagttcccttctagttgcaggaccttaagaaaataaagtgaaccccaggcaagttctctaatgacactgactcatatatagaggctttccaaaatttaacccaagtgtttaatgttacatggagagatgctatgctgcttttaagccaaaccctaactgttaagaaacaggcagccttacaggcagcaaaaaaaaaaaaaaaaaaaaaaaaaaaaaaaaaaaaaaaaaaaaaaactcaaaaacaaacagtaggtttcctagagccagtcagaaaagaaacccagtcaaaagggaaaaaaaagagacataatccgcattcccaataagaataaaaacaatgccccttaaatattctaatgggagcccttgtgatcttatagagaagtggaaaagaaaacactttctgatgtgcatattagaaagtttgcaaagaaccacaatcaagcatattaattactctaacctctccttgttaaatcagaaaccagataaaaatcccatggcctttttgaaaaggctgagaaaaactttagtaaaacaaacctccctgtgttgtgattcaggaaaaaaggtttattacttaggcagtctctaatatcagaaggaagctgctaaaacaggccctgttcaaacacctttctaggttttgtcatcctcaagttgaaactttgcagtatttaaataacactgttctctctgcctcaactgaagaggtctcaggaaggcactaaggctttcctcaatttattagctgaaaggaaatatagggtctcaaaatttaaagctcagctctgtcaaactgcagtaaagtagataggtctagtcagaaggtacaagaacaccaggtaaagaaagaattaaacttattttctccttttcctttccaaaaactcttaaacagttgggagggatcttagacattactggatttttgcaaattctgggtatttgggaatggtgaaatagttaatcttttataccaccttacaaaaactcaagcacctaaagactcacttggtaacttgggaatctaaaactaagaagcctttaaccaactaaaggcagccttacttaaagcaccaacccttaatcttcccataaggaaagcatttaatctctatgtatcaaaaaggaagttaatgaccctgggagttttaactaaggctcaaggtccaggtcaacaaccagtgggttacctaagcaagaaacttgacttgatggctagaggatggccagcttgcctcttaccagttttggtggtggcttgctggtacgaaatgccatgaagttaacaatgggaaataacttaactgtctgcattcccacataggactgctgtcctctaatgcaaacctctggctaataatcacctcctcaaatatcaagctttgctgctaaagtgatctgcagtccagttaaaaatttgcctttgcctgaacccagccactttctcccagaggaaactaaagagcctaaacgggattgtaaacagctagtggtgtaaactggtaaaagaaataagaagaatcactgtttatattctttgtaaagttttaattaattaaataaacatttttaaaatgtactcaacttaatgaaaagtgaatatccaagctataagtatattcaaaaagcctttctatttttatctttataaaacttgttttcctggaagagggttttatctcacttaactgaattacttttatccactctttcttgtcactgttgatgcaagcatagaaggccctaaaataacctctggtggcctaagactcctcaggaaaacaaaaaagccaccacaaattacattttaaaagaaatctctgctttttttaatgaaactcctagaattaaaagtaaataagtccctctcaaaatctctttttcttctagctatgcttatttgttaggccctggaaactgtattcctagccctgtcctttttttttttatgggggacagagtctcactctgtcacctaggccagagtgcaacagtgcaatcttgtctcactacaacctccacctcctgggttcaagcaattatcctgcctcagcctagtgagtagctgtgattgcaggcacctgccaccatgcccagctaaatttttttatttttagtagagatgtgttttcaccatgttggccaggctggtctcaaactcctgaccgcaggtgatccacccacctcggcctcacaaagtgctgggattacaggcgtgagccaccatgcctggcccctaaccctgttcttaaatggcctcaaatagagaccaataatccaattagaaaattggcaaacaaaaaatcttatagttactgaattttcttctgtttgtttagatggttatatacgtgttttgtgtgaagtctataaaaaacctctaattaattggtgtgcaaataagcacttcaaaaaaaattaagacaaaattaaggctgtagtgcctcttggttcatgtaactttaatatttaagaaataaaaacattcttgtaaaatacaaacgtcttaaaatgtaaacaggtggtctaaattatgcaggtcaaatactaggtttgttaaatgttttaatgttgtaaactgcttctttggcctttaagtactgtcaacctgccagcttcacaattagtaaggcctggtgacatataaaagtaaccatgcccctaactatactggaagaagtcagactttatctgctcctagcacataattaaaacaacttaccaggttttacattaaagttaaaattacaaaaagttaccattgtaacatgtaattgagactattaaaaatggatttgcatgaaatgtgtgtaaaatcagtaaaattttttaataaaaaattataagaaggcataaaaatctacatttttctcaggagtgaaagattgtcttaaattaaataaagtgaaagttttaagcaaatttttaaaatactgtaaaaattaattttgcaaaagaaaactgtaaatatatgaactaaattcaaaggaataacatatggtgttcctttaaattaagcatttaaatgaaagcacaacaagactttcttaagatgctaatctgctctgtatcaaaatttctaaaagattataaaagatttgtaaacatcaaagatccattccaagatgggcaaataggaagagatctggtctgcagatcccaacgtgatcaaggaagaagatgggtgatttctgcatttccaactgaggtacctggctgatctcatttggactggttggacagagggtgcagcccacagggggcaagccaaagcagggcaggacatcacctcacctgggaagaacaaggggttggggaatttccctttcctagccaggggaagctgggacagactgtacttggaaaaatgagacactcccacccaaatactgcacttttcccaaggttgcagcaaccagcagagaagaatattctctcctgtgcctggctcagcaggtcctgcagtcacagagtcttgctcactgctagcacagcagtctgaggtcaaaggtgacacagcagtctggttgggggaagggtttctgcctctgctgaggcttgagtagctaaacaaagtagctgggaagcttgaactgggtggagcccactgcagctcagcaaggcctactgcctctatagactccaactttgtgggcagggcatatctgaacaaaaggcagcagacagcttctgcagacttaaaagttcctgtctgacagctctgaagagagcagtggttcccccagcatggggtttgagctctaagaatggacagactgccacctgaagtcaatccatgacccctatgtagcctaactgggagacaccccccagtaagggccgacagacacctcatataggtgggtgcccttctgggacaaagcttccagaggaaggatcaggcagcaatatttgctgttctgcaataattgccattctgcagcctccactggtgacacccaggcaaacaggttgtggagtggacctccagcaaattccaacagacctgcagctgagaaacctgactgtcagaaagaaaaccagcaaacagaaaggaatagaagcaacatcaacaaaaaggacatatacaccaaaaccccatctgtaggtcaccaacttcaaagaccaaatgtagataaaaccacaaaggtggggagaaaccagagcagaaaagctgaaaattctaaaaaccagggcacctcttctcgtccaaaggatcacagctcctcaccagcaatggaacaaagctggatggagaatggctttgaagagttgacagaagtaggcttcagaaggtcggtaataacaaacttctctgagctaaaggagcatgtacaaactcatcacaaggaagctaaaaaccttaaagaaagggtagacgaatggctaactagaataaacagtgaagagaagaccttaaatgacctgatggagctgaaaaccatggcacgagaacttagtgatgcatgcacaagcttcaatagctgattcaatcaagtggaagaaagggtatcagtgattgaagatcaaaataatgacataaggtgagaagacaaggttagagaaaaaggagtagaaagaaatgaacaaagcctccaagaaatatgggactatgtgaaaagaccaaatctatgtttgataggtgtacctgaaagtgatggggagaatggaaccaagttggaaaacactcttcaggatattatccaggagaatttccccaacctagcaaactgggccaacattcaaattcaggaaatacaagagaacaccacaaagatactccttgagaagaacaaccccaagacaaataattttcagattcaccatggttgaaatgaaggaaaaatgttaagggtagccagagagaaaggtcagcttacccacaaagggaagcccatcagactagcagcagatgtctcagcagaaatcctgcaagccagaagagagtgggggccaatattcaacaatcttaaagaaaagaattttcaacccagaatttcatatccagcaaaactaagcttcataagtgaaggagaaataaaatcctttacagacaaggaaatactgagagattttgtcacgaccaggcctgcttacaagagctcctgaaggaagtactaaaaatggaaagaaacaacctgtaccagccactgcaaaaaacatgtcaaattgcaaagaccatcgatgctatgaagaaaccgtcaattagcaggcaaaataaccagctaacttcataattacaggatcaaattcacacataacaatattaaccttaaatgtaaaagggctaaatgaccaattaaaagacacagaccagcaaattggataaagagtcaagacccatcagtgtgctgcattcagaagaccgatctcacatccagagacacacataggctcaaaataaagggatggaggaagatctaccaagcaaatggaaaacaaaaaaaagcaggggttgcaatcctagtctctgataaaacagactttaaaccagcaaagatcaaaaaagacaaagaaggccattacacaatggtaaagggatcaatgcaacaagaaggttaactatcctaaatatatatgcacccaatacaggagcacccggattcataaagcaagtcaccagagacctacaaagagacttagactcccacacaataataatgggagactttaacaccccatggtcaacatcagacagatgaacgagacagaaggttaacaacgatatccaagagttgaactcagctctgcaccaagctgacctaatagacatctacaaaactctcaacaccaagtcaataaaatatacattcctctgagcacaacatcacacttattctaaaattgacaacataattggaagtaaagcactcctcaacaaatgtaaaagaacagaaatcacagtaaactgtctcttagaccacagtgcaatcaaataagaactcaggattaagaaactcactcaaaactgcacaactacatggaaactgaacaacctgctcctgaatgaccactaggtaaataatgaaatgaaggcagaaataaagatgttctttgaaaccaatgagaacaaagacacaacataacagaatctctgggacacatttaaagcagtgggtagagggaaatgtatagcactaaatgcccacaagagaaagcaggaaagatctaaaattgacaccctaacatcacaattaaaagaaatagagaggcaagagcaaacacattcaaaagctaacagaagacaagaaataactaagatcagagcagaactgaaggagatagagatgcaaaaaacccttcaaaaaatcattgaatccaggaggtggttttttgaaaagatcaacaaaattgatagactattagcaagactaataaagaagaagagggaagaatcaaatagatgcaataaaaaatgataacggggatatcaccacttatcccacagacatacaaactaccatcagagaatattataaacacctctatgcaaataaactagaaaatctagaagaaatggataaattcctggacacataaaccctcccaagactaaaccaggaataagttgaatctctgaatagaccaataacaggttctgaaattgaggaaataattaataggctaccaacaaaaaaagtccaggaccagatggattcacagctgaattctaccagaggtacaaagaggaggtggtaacatttcttctgatactattccaatcaataaaaaaagacagaatcctccctaactcattttatgaggccagcatcatcccgataccaaagcttggcagaaacacaacaaaagagaattttagaccaatatccctgatgaacattgatgcaaaattcctcaataaaatactggcaaaccaaatccagcagcaaatcaaaatgtttatccttgacaatcaagttagcttcatccctggaatgcaaggctggttcaacatatgcaaatcaataaacgtcatccatcatataaacagaaccaacgacaaaaaccacatgattgtctcaatagatgcagaaaaggcctttgacaaaattcaacagcccttcatgcaaaaactctcaatcacctaggtattcaaggaatgtttctcaaaataataagagctgtttatgacagaaccacagccaatatcatactgaatgggcaaaaactggaagcattccctttgaaaactggcacaggacagggatgtcctctctcaccattcctattcatcttagtgttgaaagttctgggcaatcaggcaagagaaagaaataaggcgtattcaattaggaaaacaggaagtcaaattgtccctgtttgcagatgacatgattgtatatttagaaaacctcatcatctcagccccatgtctccttaaggtgataagcaacttcagcaaagtctcaggatacaaaatttttcaatgtaaaaaatcacaagcattcctatacacaaataacagacaaacagagagccaaatcatgagtgaactcccattcacaattgctgcaaagagaataaaatacctaggaatacaaattccaaggaatgtgaaggacctcttcaaggagagctacaaaccactgctcaatgaaataaaagaggacacaaacaaatggaagtacattccatgctcctggatgggaagaatcaatattgtgaaaatggccatactgcccaaggtaatttatagattcaatggcatccccatcaagctacctctgactttcttcacagaattggaaaaaaactactttaaagttcatatggaaccaaaaaagagccctcattgccaagacaatcctaaccaaaaagaacaaagctgaaggcatcacactacctgacttcagactatactacaaggctacaataaccaaaacagcatggtactcataccaaaacagagatatagaccaatggaacagaacagtggcctcagaaataacaccacacatctacaatcatctgatatttgacagacctgacaaaaacaagaaatgaagaaaggattccctatttaataaatggtgctgggaaaactggctagccatatgtagaaagctgaaactggatcccttccttacaccttatacaaaaattaattcaagatgatttaaagatttaaatgttagacctaaaaccataaaaaccctagaagaaaacctagacaataccactcaggacataggcatgggcaaggacttcatgactaaaacactaaaagcaatggcaacaaaagccaaaatcgacaaataagatctaactaaactaaagagcttctgcacagcaaaagaaaataccatcagagtgaaaaggcaacctaaagaatgagagaaaaattttgaaatctacccatctgacaaagggctaatatctagaatctacaaagaaatcaaacaaatttacaagaaaaaaacaaacaaccccatcaaaaagtgggcaaaggatatgacagacacttctcaaaagaagacatttatgcagccagcaagcacatgaaaaaatgctcctcatcacttgtcatcatagcaatggaaatcaaaaccacagtgagataccatcttatgccaattagaatggtgatcaaaaaagtcaggaaacaagattctggagagaatgtggagaaataggaacacttttacactgttggtgggagtgtaaattaattcaaccattgtggaagacagtgcagcgattcctcaaggatctagaactagaaataccatttgacccagcaatcccattactggatatatacccaaaaaattataaatcatgctgctataaagacacatgcacacgtatgtttattgcagcactactcacaatagaaaagacctgtactcaacccaaatgtccatcaatgataaactggattgagaaaatgtggcacatatacaccatggaatactatgcagccataaaaaagtatgagttcacgtcctttgcagggacatagatgaagctggaaaccataattctcagcaatctatcacaaagacagaaaaccaagcatcatatgttttcactcataggtgggaattgaacaatgacaacacttggacacagtgtggagaacatcacacactggggcctgtcgtggggtgggtgccaaggggagggatagcatgaggagatatacctaatgtaaatgacaagttgatgggtgcagcaaaccaacatggcacatgtatcaaacctgcatactgtgcacaagtaccctagaacttaaagtataataataaaaaaaatttgtaaaaatctcacttcatgtttaaactggttaagattaaatagaattatctataaggtttcattaaaattggggttaacattaatagtaaactaatgcaaggggaaaatttggctttttctttttaacaggatttttatgtagtagtaagggccaataaaagatttttgctttttcaaatttttaattcttcatgttggcaaaacaaatagcttatggtaatctaaaattctattccttaagattaactgttttagacctctaacatatttaagaaggtccccaaaatcaaacttcagtctcaaaggttgtctttcctgatgcatggctttttggtgctacaaagagcccctaaagcattcaaaagaaaggcaaacagaattattgaacatgtttaggtacatgggattgtcaaaatgatgtcttttttttcagtttatatttaagtatataatattgacatatgttccaaaactatatggggtgtctaaggttctaatgtctaaatatgtgctaccaatcaaaattaaggttgttatgttgggttattgtaaactacaaagataaccaaatttttttgtcagtcgtgtttctaactgtaaccctggatattttgtcattggcagacaattttcttgttttaatcctcttaaaaatggtttataatcagctgtgggactttaacaggtgctctcaaatgcagatttctgataacagataaaagtacagaactcataaaaagctaaaatgtttatggatatcaagcagaacaaagttaatagaatggatttagctaatggaaaactaaagcaatgcttttaacttttgcttaaagcattgctaattcttattttgtttttcagagtcagaaaaactttcttaaaagttttaaaccactgagcaaggtatactgcttaaacataatttggaccttgtctgtttctttttgcctggttctgctaaaaataaaaaactatttataagtattctttttttaaattttttaaattacactttaagttctagggtacatgtgcacaacatgcagttttgttacatatgtatacatgggccatgttgttgtgctgcacccattaactcgtcatttaacattaggcatatctcctaatgctatcccttccccctacccttaccccacgacaggccacagtgtgtgatattccccttcctgtgtccaagtgttgtcattgttcaattcccacctatgagtgaaaacatgcggtgtttggttttctgtccttgggatagtttgctcagaatgatggttcccagcttcatccatttccctacaaaggacatgaactcatcctcttttttggctgcatagtattccatggtgtatatgtgccacattttcttaatccagtctatcattgatgggcatttgggttggttccaagtctttgctattgtgaatagcagcacaataaacatacatttgcatgtgtctttatagcatgtgtctttatagcagcatgatttataattttttgggtatatacccagtaatgggattgctgggtcaaatggtatttctagttctagatctttgaagaatcaccacactgtcttccacaaaggatgaactagtttacagtcccaccaacagtgtaaaagcatttctatttctccacatcctctccagcgtctgttgtttcctgactttttaatgatcaccattctaactggtatgagatggtatctctttgtggtttggcttgcatttctctgatggccagtgatgatgagcattttttcatgtgtctgttggctgtgtaaatgtcttcttttgagaagtgtctgttcatatcctttgctcactttttgatggggttgtttgattttttcttgtaaatttgtttaagttctttgtagattctagatattagccctttgtcagatgggtagattttaaaacttttctcccattctgtaggttgcctgttcactctgatggtagtttcttttgctgtgcagaagctctttagtttaattagatctcacttgtcaattttggcttttgttgccattgctttcggtgttttagtcatgaagtccttgcccattcctatgtcctgagtggtattgcctaggttttcttctagggtttttatggttttaggtctaacacttaagtctttaatccaccttgaattaatttttgtataaagtgtaaggaagggatccagtttcagctttctacatatggctagccagttttcccagcaccatttattaaatagggaatcctttccccatttcttatttttgtcaggtttgtcaaagatcaggtggtggtagatgtgtggtgttatttctgaggctctgttctgttccattggtctatatctctgttttcatactagtatcatgctgttttggttactgtagccttgtagtacagtttgaaatcaggtagtgtgatgcctccagctttgttctcttggcttgggattgtcttggcaatgtgggctcttttttcgttccatatgaactttaaagtagtttttttttccaattctgtgaagaaagtcagaggtagcttgatggggatgacattgaatctataaattaccttgggcagtatggccattttcacaatattgattcttcctatccatgagcatggaatgtacttccatttgtttgtgtcctcttttatttcattgagcagtggcttatagttctccttgaagaggtccttcacattccttggaagatgtattcctaggtattttattctctttgtagcaattgtgaatgggagttcacttatgatttggctctctgtttgtctgttatttgtgtataggaatgtttgtgatttttgcacactgaaaaattttgtatcctgagagtttgctgaggttgcttatcagcttaaggagatgtggggctgagatgatgaagttttctaaatatacaatcatgtcttctgcaaacagggacaatttgacttcctcttttcctaattgaataccctttctttctctcctgattgccctggccagaacttccaacactaagttgaataggagtggtgagagagggcatccttgtcttgtgccagttttcaaaaggaatgcttccagtttttgcccattcagtatgatattggctgtgggtttgtcataaatagctcttattattttgagatacgtcccatcaatacctagttgattgagagtttttagaatgaagggttgttgaatttttgtcaaaggtcttttctgcatctattgagataatcatatggtttttgtatttggttctgtttatatgatggattaagtttatgatttgtgtatgttgaaccacccttgcatcccaggggtgaagccaacttgatcgtggtggataagctttttaatgtgctgctggatgcggtttgccagtattttattgaggatttttgcatcagtgttcatcagggatattggtctaaaattctctttttttgttgtgtttctgccagactttggtatcaggatgatgctggcctcacaaaatgagctagggaggattctgtctttttctattgattggaatattttcaggaggaatggtaccagctcctctttgtacctctggtagaattcagctgtgaatccgtctggtcctggacttttttttattggtatgctatcaattattgcctcaatttaagagcctgttattggtctattcagggattcaatttcttcctggtttagtcttgggagggtgcatgtgtccaggaatttatccatttcttctagattttctagtttatttgagtagagctgtttatagtattttctgatggtagtttgtatttctgtgagattggtggtgatatctcctttatcattttttattgtgtcgatttgattcttctctcttttcctctttattagtcttgctagccatctatcaattttgttgatctttttaaaaaaccagctcctggattcattgattttttggagggttttttgtgtctctatctccttcagttctgctctgatcttagttatttcttgccttctgctagcttttgaatgtgtttgctcttgcttctctagttcttttaattgtgatgttagggtgtcaattttagatctttcctgctttctcttatgggcatttaatgccataaatttccctctacccactgctttaaatgtgtcccagagattctgttatgttgtgtctttgttctcactggtttcaaagaacatctttatttctgccttcatttcattatttacccagtagtcattcaggagcaggttgttcagtttccatgtagttgtgcagttttgagtgagtttcttaatcctgagttcttatttgattgcactgtggtctaagagacagtttgttataatttctgttcttttacatttgctgaggagtgctttacttccaactgtgtggtcaattttggaataagtatgatgtggtgctgagaagaatctatattctcttgatttggggtggagaattctgtagatgtctattagatctgcttggtgcagagctgagttcaactcctggatatccttgttaactttctgtctcattgatctgtttaatggtaagagtggggtgttaaagtcttccattattattgtgtgggagtctaagtctctttgtcagtctctggtgacttgctttatgaatccgggtgctcctgtattgggtgcatatatatttaggatagttagctcttcttgtttaattgatccctttaccgttatgtaatggtcttctttgtctcttttgatctttgctggtttaaagtctgttttattagagactaggattgcaacccctgctcttttttttcctctcatttgcttggtagatcttcctccatccctttattttgagcctatgtgtgtctctggatgtgagatgggtctcctgaatgcagcacactgatgggtcttgactctttatccaatttcccagtctgtgtcttttaattggagcatttaacccatttacatttaaggttaatattgttatgtgtgaatttgatcctgtcattatgttagccggttattttgctcattagttgatgctgtttcttcctagcatcgatggtctttggaatttggcatgtttttgcagtggctggtaccagtttttcctttccatatttagtgcttctttcaggagctcttgtaaggcaggcctggtagtaacaaaatctctcagcatttgcttgtctgtaaaggattttatttctccttcacttatgcagcttaattttgctggatatgaaattctggttgaaaattcttttctttaagaatgttgaatattggcccccactctcttctggcttgtagagtttctgttgagagatccactgttagtctgatgggtttccctttgtgggtaacccgatctttctctctggctgcccttaacattttttccttcatttcaactttggcgaacctgacaattaattgtcttggagttactcttctcaaggagtatctttgtggtgttctctgtgtttcctgaatttgaattttggcctgccttgctaggttggggaagttctcctggataatatcttgaagagtgttttgcaacttggttccattctccccgtcattttcaggtacaccaatcagacatagattaagtcttttcacgtagtctcgtatttcttggaggctttgttcatttctttttactcttgtatctctaaacttctcttctcacttcatttcatttatttgatcttcaatcactgataccctttcttccacttgatcaaatcggctcctgaagcttgtgcatgcatcacgtagttcttgtgccatggttttcagctccatcaggtcatttaaggtcttctctatgctgtttactctagttagctctcttctaatcttttttcaaggtttttagcttctttgcgatgggtttgaacatcctcctttagcttggataaggctgttattattgatcatctgaagccttctctcaactcatctaagtcattttccatccaccttttttccattgctgatgaggagctgtgttcctttggaggagaagaggtgctctgatttttagaattttcagcttttctgctctggtttctccccatctttgtggttttatctacctttggtctttgatgatggtgatgtacagatggggttttagtgtggatgtcctttctgtttgttaattttccttctaacagtcaggaccctcagctgcaggtctgttgcagtttgctcgagttccactccagaccctgtttgcctgggtatcaccagcggaggctgcagaacagcaaatattgcagaatggcaaatattgctgcctgatccttcctctggaagcttcatctcagagggccacccagctgtatgaggtgtcagtcagccactactgggaggtttctcccagttaggctactcgggggtcagggacccacttgaggaggcagtctgtccattctcagatctcaaactctgtgttgggagaaccactactctcttcaaagctatcaataggaacgtttcagtctgcagaagtttctgctgccttttattcagctatgctctgcccccagaggtgtagtctacagaggcaggcaggcctccttgagctgcggtgggctccacccagttcgagcttcccagccactttgtttacttactcaaacctcagaaatggcacattcccctcccccagcctcactgccaccttgcagttttatctcagactgctgtgctagcagtgagcaagtctctgtggttgtgggaccctgcaagccaggcatgggatataatcttctggtgtgctgtttgctaagactgttggaaaagcacagtaatagggtgtgagtgtcccaattttccaggtacagtctgtcacagtttcccttggccaggaaagggaattccccaactccttgcacttcccaggtgaggtgatacacttccctgcattggctcacactccatgggctgcacctactgtccaacaagccccagtgagatgaacctggtagctcagttggaaatgtagaaatcacccatcttctgcatcgctcacgctgggagctgtggactggaactgttcctattcagccatcttggaacctctatcaactagttgtaagtattcttaacttgcaacaatatagttgtttgcatcaatgaaacaaaaatcctttttctattttttctttcttttgaaacatagtctcgctctgtctgtggctggcatgcagtggcaaaatcttagttcactgcaacctctgcctcccaggttcaagtgactctcccacctcagcctcctgagtagccagtactacaggtgtgcaccaccacggccagctaacttttgtatttttagtagatatggggtttcacaatgttggccaaggtggtcttgatctcttgatctgcccacctcaggctaccaaagtgctgtgattacaggcatgagccaccgtgcccagctgaaaaatccattttcttatgcagtgaaacacaatagaaaaatgctagttctttagcaaggctttaactggaagggtgtgttttcctttaagaaatcaagtttaagttgcaaagccagtaacagcctcttgggaaagctggtctcatacctgtagtctacacagttctcatacagaattcctggcctgtggtgagtaaaaaaatgtctctttctaacagactcagaaacactatgatcttgggacctcaaaaatacaggaatttacccaattcacaaatatttaagggtacaaatccatggcttagcccagctttagaaagtcctatctaagatttcttttggaacagagttccatcaaagcttatgaaaaaggcctatggagagatagttactcttgctgcactatgttcaaataggccaagtataataataaagtctattttgcaaacaattcagtctattgtgagttgtttttaactaaagaaaatctaaaaacaaaatcatgtttcaaagcttaccatacatttctcatgaacttctagtctcattgattgttttagagtttttgatgacgttttaaactaaccctgcttattcctgtaagccaaccagcaatctctgcctgcagctcagaaaacagaaagggaagggtaatgtaaaaatctaaatcaatatgctagttctgagcaattattctgtaaatccagctggaaataaataaggtgccaataacccagaggtttcttttatcagaaagtaaaatcaaaggagctaaccaaagccaagcctcatgcacccaaatcttagcaaacataactatagctaccaggtatcagggtgtgtcaacagcctcaacatttttaggcttttcctaccccccttaattcatttcaatgcctctcctctactaaaccagattgtttctttttgccttaaaaactatcaagctctaagtggtaatgcaaatggaatgacgcataaacacatgtttcttctgaggacaattaaactagccatggaagaagtcctagctgctgttttctacacagcacccctttccagcgaggaatagccaaaaatatcaatgcctcttctccctaacagcagttagggtctccactcctgaggaggaactgagagggattagctagctagcctaaggtagacagcaagggaagggtccctggagagcacccaacccatgggtcagtgcatcataactacatatccaccaagcccagcataatggcacacacctgtaatcctagtgactcaggaggctgaggcatgagaattgcttgaacctgggaggtggagggtgcagtgagatcacaccattacactccagcctgggcaacagagcaagactcagtcttaagaaaaaaaaaactcatctttcaccaatattttaatcgttttatgtctgcacacttaagcatcaaggacagggtcctggatgatgataagtgcatatttcaatttataaagtaaaaaatgaccatcagagtctaataaatgatgaatacagcaacatcatacttcataaaatcattccaggtatgtttgacaaacaagaaggttgcataggaccttcttgtgctactcatgtgaagtgctcttctctctcatgttaatctcaactcccaaccttacaaataccacatactcacatatacagaaaaagaaaaattaacttattttcataggaggctgtgattcacattttattctattacatcttttccacattgctgttacaatactgttgaagtgcaccctctttcaccagaagaatacttttgtgaacgtgaatagactgacactggagaagaccagctcagcacactcacttgaatgatccctttgcttttcaggcagtaaaaatcggggagtgaaaataaagtgactgcggattaagcaaagagttatacatggaaaaacatttgtcaattgtttgaagattacattgcatggtctacaacttttaaaatataaaatgcatagcataaatgttgcacaagaaagtagaataaaaatgatggagttggccacaaaggatagctaaagctgtactatagcaatatagaaaaatacatatttactgtcagaagaaggtaacttgaagtatttgaaagatgttctctaagaaactaaaactatttttagttttagattctgtaaaaaatgtttcttaagcatttttaattttcaaaaacatttgagtgcatttttgtcagcttagtttctctgaagaatttaaatataataaagtaatacatattaaaaataacttttctggcaatagagcagcttaatttttagattaaaaaagtaaaattttacacaattttatgctgaccaatttaatcaaaagcttctttcttacaacttggagaaatgacacaaagactcaacttttatgttgggtgggagagaaaatgattaccaggggctagaaacttgtttcactaatcaatgttgatttttattgctatattgtctcaaattatgttaataataaaataatggccttgatccaaaaaattttttacaaacttattgcttcaatcagccaaaatattaaccaaaagaaggcatagaaatagaggtatttaacagtcataatttatagtataaaattaaaatgtttctagaaataaagaaagatatataaacaaataagaaaaggaaaaaaagtggattcctcacaataggtagggtgtgaaatcaacataagggttcatcaacagttgaatgaattttaaaaagtggtatatttacacaatggaatgctctttattccttaaaaagaaagaagtcttggaggtgggctcagcagtctgtgtctcagcaagccttgcagaaattctgatgcacactgaagtttgagcgtcactggaatggacagtgtccaaatgattgctgggtcaccccacctatcctgaatgtcaggaacatcccgagtgagactagtcagtacattgtagctctttctccagccacaaccagaaagtctttgcttcccctttgccttccaccatgattgtaagtttcctgaagcctctccagctgtgcgaaactagaaaaagatgcacacccaaaagccccatttgaagcttctagacagaaagccaagcatttggagagtgtctttggacagttttaaacacaactgtggaaaagaaagcagccctactcagtgtgaagatgatgagaatgaagacctttatgatgatctacttccacttaataaatagtgactttagaatccttaacacagcactcagctaccaatgccaatgaataaaattttgcatcactgttgaaatctgttcaccactccttttgtagatgttctgagttgggtaccagaagtcaattatctcattattaagatggcttctaaggtgattcatttttgtgacacataatgagtgttagttgaggtctagctgtatgctgaaaaatgctgatgaaaaatgttgtctacagagaggatagtcaacttatattaactgtgagttatactaggagctatacttaattcatttagactttatttggtcagctttttttatatttcataaaaagaagaaagattaaaaaaagaagtctttttaaatatatattctgctcaaatcaccatttccttttttttctgattcaaaggactttttcaagatctttcagggattatattttctttcaccttctatctgcattctctttcttcagccaattgattaaaaaagagatgcagagaagacacatttgcttctcatccacacatcacttccacttgctattagtcattgtgagtagagctgagaatagcagctttctagcatgacagcaacttctcagaaaaaagcaacactcggaaacaaaactataaatcttttcaaaagctaatgtattttaagcaaaataagcagatgcatcaataataaaatgcttgtggtagaatcgatttattttgttgatttctattgagttcagataagatttgaccaaaagctagcaaatatagagcagaaagaagaatattatctgaaatcagaatatggtaaatgaagttaatttgtcaaaagaaataagaatattatgacctcatgctaatagtctcatctatggttgtaaaacatcaaatgctactttttattataaactgtagttcatataagtattccatttatatcaccctctttcactatttcaatgtcttctccactttgtatcagtggaaaacaggtcagctgcttccaggaaagcaggcaatgctcttcttactttaacaatgatgatgaagagcacttgttttggtgatactcccatgccaaaaactgttattttgcctgaagtactctatatttgttaataaaataaaattattaaccaagaggaatttatccattcaagttttatggaattttggttacatttaagtgtctctgactttcgtggaatattgaaatttttatgaatctaaatagagtactataaataaccttttactaaaagactttttgaagtggagtgatatttataaaaacttttcatagcattgaagaaatgttttaaccatgttcccagtaactactctgagcacagaattttccatttttagaattcgctctgagtcactcaggggaaattgatatctttacgaatgggcaaaaaaaggtgctgagtggaggtgcaacacattgcacatcaatgcttttcacatgcaactactagggtcttaatttgattgaactctcatttgcatagctagacacttactgaatctagtcatactattttttggcaactaatgccatgtttgttacccattagttttatacacttatttgcttggctgaaaaaacttaatcttctcttaatttactctaaattgagagactagatttacagtctgggtctataatagtagttgaatgtttttaatactattcttggcaaattctcatatattcacattcaaaacagatataaattttatgaaaaggagttgacaaaaagtaaaaaatttcaaataggttaagtaagttttgagatctattgcacagcagggtaactatagtaaactataaactattccatatttcagaataactaagagtaaattccaaatgtaccaccacaaaaatgataggtaagcaagttcatagatatgttattaaatgaaacttaattattcaatattttatacatatactaaaacatcacattgtatcccataactttatgcaactgtgatttgccaatcaaaaatactaatacattttttaataagaaagagtgaaataagctttaaaatattgcaccagagaaaaatgtggctgttaatcttaaaattttaggaaacatatacatatatgtatattttatttcaaatggcttgctcatttacagatgtaggtaagtaaacttttaatatcatgaacagtcagaacccagcactcagaaataggctgttgatttttaatgttcaaaataatatagtactttaaaagacagactctaaagcaactgtttacagtaaaattctaagtttttaaacaaatgatttccttcacttgttagaaaaaaattttaatatatatttttaaactatattgaaatttatcaaattaacataaatttattaaacaagtaaaaaaatgtgccttcttgtctctaattataaaactgacagagactctgcatttaaccaaatactttggtaaatggattttaacaatgatatctctcatgacttaaaacagccactagttttaatttagaagtatattaaatttttatattaaaatctaggattagtctattattacatagaaaatttgtggtctgcatgtacatcatcatccattgaatggtccacagtttctgagtttcagaaatgttaatataagaatacttcttctgattgaataatttaagttttctcagtaactaaaaaagattggaattactgatcactcacttataatgtggttttaaatgttatttaatgaagatatataaagtttcttttaaaatcattttaacaacatatttctcttgcttttcacttttattagaaaataagtatgaaaatttatgttaccacaagactataaattttatttaaatctagacataatgctaatcttaaaagatctgtatgtttaagattatggataaccaatttacacttaaaagataaataactgctttccagtaaatcaaatggggcaattttgactctcaattataagctattaaaatattaatactatcacctatgtggaaattttaggtatctgcatgttcatgttttttagcatataataaatcagaaactataaatttttataaactataaataataaactaaaaatttaaagtatcactttttgtcagttttgaaatactgtcattatttctaggtgatataacactcaattacagaggctgtggctgttgaaattagaaatgtcatggttgattcttctttacttgctgcctttttatttcacacaaactcagcagcacaaggaaggcaagaaatgctacaccttgattgcaaacacaccagtgcctttcaaaggagaataaatgtctgagcatattctcttgaaattcatggcatcttttgctcaagtacagactttcatatggaaaataataaagacaataatttcacatggcaatagcataagaaaagtactctaaaaataccttctgacccattatttctatttttcacaagaatgattgtgatggaatgagcatttgcagcactgtggtcataaataacccccactttctgttgaattatttttggaatgtgactataagacttttgtgctttttttttggaaaaaatattttatatttctaattcagtgatttagcataatttttagtctcacactttcaaaaatagttcattctgaaaaaaataagactaaaccacttaccaccttttcccccaaaagagtaacaaattaaatctatagtctactgcacagttaatacataaacgataaaggtgtaatttgttttacctgcacacttgaaaataaaacactttttgggctatagaccaagaactttcagagaggttagcttataaaatgtgaggagacctggtatagaaacattcaccactatgccttaaggggtgaaaatttgtctttcacccctaatttcaaccattaacccagagctggaaaaatagaacatgtcattataccaaaaagcattttattatttttattttatatttaaggggtacatgtgcagattcgtaaaacaggtagactacatgatattgaggtttgaacacttaattattccattgtctgagtagtttacatcatacctaagccaattttcaatgcttgtcacccttccttctcttattgttttcatctttgtttccatgtgcgcccaatttttagcgtccatgtatgagtgagaacatgtggcatttgtttttctgatgcatcagtttgcttagaataatggccttctgttgcattcatgttgcggcaaaagacattacttcattctcttccattgctgcgtagtattggaggttgtataagtacatcatttttcttatccaataaaagattcatgggcaactggtttaattctgtttttgctattgtgaatagtgttgcaatgaacatgtgagtgcttgtgtctctttggcaaaattatttattcttttttggggcagatacccactaatgggctagattagtcaaatggcaattctatttctagttctttgagaagtctccaaactgctttgcacaggccctgaattaatttgcattcccaccaacagtgtagaaagattttcttttctctgcaactttaacatcttatttatcttacttttaataacagtcattcttactggtgtgaaatggtatcacactgtcactttgatttacatcttcctgataattaggaatgttgagcaatttttacatgtttattggcagtgcttatgtcttcctttgagaagaagctggctattcatatcatttgtttgcttttttattaaatggtttatagattctgcatattaatccttcattgtcggcagtttgcaaatattttatttcatactgtaggtcatctgtttactttgttgatagtttctttcactgtgcagaagttctttgccttaattagatgtcattttttatttttatttttgtcgcactcatgttcatgttagtcataaattctttagagaggccaatattttctaagtgttcttctaagaattttgtagcttgaagactcacagatcaagtctttaatttatgttgttatttttttatatagaaaaaggtaggactccagttttcttccacatatgactaacaagttttcccagtattatttactgaatagggatttaattctgttggctttgtaaaaataacctggttgtaaagtatagcttaattcaggactgtctcttccatttcattggtctatatgtatatttttgtaccagaatcatgttatactggttactctgatgcaatcttggctcactgcaacctccacctcccagttcaagtggttctcttgcctcagcctcccaagtagctagaattacaggcatgtgccaccacatctggctaattttttgtatttagtagagacgcaggtttcaccgtgttggccagggtggtctcaaacttctgacctcaggtgatccatctgtgtaagcctcccaaagggctgagatgacaggcatgagccaccacactcagcccagatttattcttttagtttgaagttgtcttggctatttgagctctttaattcttttgtatatattttagaatagttttctttttctaattctataaaaaagcatcatggatagtctgataaaaatagcacttaatctgtaggttgctttagtcagaatgaccattttaattatattctttgaatccatcagcatgcaatatttttccatttatttgcattctcgctcatttctttcagcaatgttttcttcttctttgtacagatattttagctccttgatttaatgtatttcttgttttttttttttgtttgtggctattgtaaatagagctgtgttttttattttgttctgtttgaatattattggtgtatagaagtgctatgcatttgtgttgattttgtattctgaggtttttttggagtcttttttcaggcttcagagtcttctggtgaaatctttaaagtattctaggtagacaattctatcatcagtaaagataacttgactttgttttctgtttggattccttttatttctctggctaggacttcgtaacttcaataggactgtttagaatggatattcttgtcttatttttattcttatggagaatgctttcagtttctgcttttttagtatgatgttggctaaggatttgtcatagatgactcattattttggggtatgtttcatcaatgtctagtgtgttgacaatatttttatgagtcaatattggattttcttgaatgccttttctgccccattgtgttaaatattttttattttatttttacatggtgatcatacttattgacttgcatatgatgaaacatctttgcatttatggaataaagttcacatcattgtagcaaaataactttctgatttgcttttgaattcagtttgctagtatttcatggaggattattgttccaatattcacccagaatattgaactgtagtttctgtttttgttgtgtcttcactagattttagtttcatgtatttcactgatttcatataattagttagggtgaaatcccaccttgattttttggaatacattcagtaggcttaggaccagcttatcttcgtatatgtggtaaaacttgtctgtgatttcatatgatccagggctttttatgattagtaggtctattattacttattaaatgtcattatacatcttatacatttttgttgttaaagattgctgttattaggccaggtgcggtggctcaggcctgtaatcccagcattttgggaggacaaggtgggcagatcacgaagtaaggagatcgagaccatcctggctaaaatggtgaaaccccacctctactaaaaatacaaaaaattagccgggcttggtggcgggagcctgtagcccagctaattgggagtctgaggtgggagaatggcatgaacccatgaggcagagcttgcagtgagccaagatcacgccactgcattccagcctgggtgaccgagtgagactccatctcaaaaacaaaacaaaacaaaaacaaacaacaacaaaacaacaaaaaaaaagacttctgattttctggttcaatcttgagaagttttgtgcatccgggagtttatctattttctctaaatcttctactttgcatgcatgttcatagaagtctctgagaatatttttaaatctatgtagaattagatgtgatttcacatctctaacatttaaataaatgcagaataagagttaaacaaaattcaacattccttcatgataaatttctgaaaaaagtaggtataggacaaacgaacctcaagccaataaatgccacatataacaaacaaacaaaaaaaagcacagctaataacatactaaacagggaaatcttgtaagcttttactctaagagcaagaagacaaaaatgcccactttcttcagtcttattaaacatagtatgaactatccaagacagaaatattagaaaataaaatcaaagtgctgagattagaaaaattgttaaattattcctttgcaattttttatttctatacataatcttaagtaaacaaaagcctaagacattactaaaaattagtaggactaataaacaaatttattgaactttcagaatacaaaagcaacatccaagtgtcagtagaatttctatatattgacaactatctctaaatgaaatgacagaaattaatacacaattggaaaatattactcctttataaattggcattactaatattgttaagcatctgtattatacaaaatgatgtacagatataatgcaacctctatcaaaataccagtgatataattaacaaatttaaaaaactacatctaaaatttatagggtaccacaagagaacctgaatagccaaagcaaccaagccgtagaaaaagtgaaggtatcactacctgactttgaaatatattaaaagttttagtaaaaaaaaaaaaaaaaaagtacggtacttgcacaaaaacagacacacaggccagtagagaagaaaaaggagactaaaatatactgatgtatttacagccatctgctttttaaataaaggtggcaatttcttagggaaaaggcagtatcttcaataaatggtgttgagaaaactttatatccacatgcagaggaatataataagaccctcaactcacaccatatataaataaattagatatttaaataaaataaaaacacaaaataaatttgatacttaaatgtaaggtctaaaactctgaaactactacaaaaaataaagactgaaagccctgtaacattggttgggcagtgacttttaaaatttgacctcaagtctcaaggagcaaaatgaaaaaaatagatcaatcagattatttaaattaaaaaactgctgcaaagaacataatacaatcaacaggatgagacaaccaaaaaatggaaggaaatatttgcaaatcataaatgtgacaagggattaatatcaaaactatgtaacaaactcaaatgactatagaacaaaaaacaagtaactattaaaaatgagaaaaaggcttaaatatttttcagaaaaagacatacatatggccaacagatatatttttaaaatgctcaatgtcaattattatcagggaaagacaagcaaaaaaaaaaaagaaaaacgatgagatatcaactcgcttctgttagaatgactctaattaagaagaaaacgtgatggtagaaatctgaagaaaagaaaatgcttgcacactatttgtttgaatgtaagtgaggacagccattatgaaaaacttaatagagttttcttaaaaaacttaaaaatcaaactaccatataacaattgcaccattgtatatccaaaacaaatgaaatcagaatgaagaaacatttgcacttctaggttgtttgcagcactcttcacatgtaaaatatataaaatcaacagttcaacatctaatgagtaaataaagacaatgtggtagatatatacaatggaatactattcatctttaaacaacaaaaattctgttattttcaatcacagggattaacctggaggacattatattagttgaaataagcaaggcacagaaagattcatgtctcatgatttcacttacacgtggcttctaaaaaagttcatctcattgacgtagagagtaaaatggtgaccaccaagtgccaaggtatttagaagaaataggggcattgaaagatgtctgtcaaagaatatataattatacttggataaaagaaataatttccagagatttattgtacagcatggtgactatagttcataataatgcatttgtatttttgaaaaatgcttacaatttcatgttgtctaaccacaaaaatgttaccaatatgagacaaagcattaatcacatagaactaagcatttgacaatgtatatacacttcaaaatgttgttttataaaataaatattttgtcaagttaaaaatatatttttagacactatagaaggataacaatgttccaaatactgtctgtttcttttataaaacttagcagtatcctatcgtacagtttttcagctgttttgccagtcataaccataggaacgttgatgttcaacagcatgttctgaacccagcacagggcatgggagaagccaatgactttagggcttttattttaagcttgcggcacctggagttactggtgcttatggtaacagtacgaaagacaggaaaagggcaggttgcttatgctcccatgactggccactgtgtgatcacagtaaactggtttgcatgcaaactcacaggaaatgttttaatccaaaagctgccattatctccaaaagttttgagagaaaatgatcaaggagatcgctacacttaggtgaccaacaatataaactgtagactaaacttcagccactaaaatttttatttaaaaagtgagcgatacatttctccaaattgtagtatcaatatggaaaataaatattattccaaatttacaggttattttattgttttgcaacctttaacattcactttaaaatagacaattttgcatggaaatgtaggttgtgctctaagtacatcctaaataactaaatttaaaattgcttacttactattctcttaaaaattgaatctttataatatacatatggtctagcaaattatgtatttgccacactatgtataaaaatctaatatttttcttttacaaagaaacaccatgttgatttaatcctctcttcggtagacagtgtatgtcttttatgttaattaaccaatcttaaagttatactgataagcaaactttccagttaaaaccaatgtttcagtgcattaaaaaataccgatgttctccttaaaacctacaacataccatgtgaaatcgcatggcatgaaaacaacagtgagaaaactgtagccataacacagaaaaaggactgtgatgcatatatggtttgagtgcacttaaaaagacaaaacttagataattaagacgtgaatgaagcatttctctttaaattcagcaagattcagctttgcagcctggaaaaagatgttctgctcacatgaagaatcaatgttatttcttcacaatttgtattttccatctctgacttgaagttacaaacttcagcaggaatatttatgactaattataaagcatctgttacacactgagcactgtcatgtttgtttgctacatttatatataaaagcatccacatgacttatgaagcttccctagtacttactgaaacaaattgactcaataaataaaatttacttttgttacttataaaaagttaagggaacaataactaaagtaagcctatatatggttctcccatagaagctaatggaatgttttaactaaataaaatgtaacaatacacaaattgtggaattatatctaaaaataattttgtttgcatgatgaaattttacaaaaattattcttttaactacaaatcagctcagattaaatacttcataaactataaaacaaaaaaataagaaacaaaaagattatgggtctagcatgagtatcatgcaagtaaaaacaaaatttacatggaaatattctaaatgataagctataagataggtgtataaattgaatacaaagcagagagtatacatttgcttttattttatttttttaatttttgtatttttagtagagacggggtttagtagaggtcaggggtctcgatctcctgacctcgtgatccgcccgcctcagcctcccaaagtgctgggattacaggcgtgagccaccgcgcccagcctacatttgcttttagcatttttgaggatttttgtttcctagtaaattagacatcttattaaatgctttgtggtttcaatattcctcttttctcctgaaaatagttacaaacttacagtcaaacaaacacacttactccttaaacctaagttatatctttagactaatagatgtgtatatttaactctatgtaagtcaaaactaaaactcgattatgtgctttcaggcagaggccacatgtgcaaaaaatacataataaatttttgaaaattattcaggactcagaaatatattgattttatttacacttatttacaatttttatgatgaccataaaaataaccatgtagtcaataacaatttaattgtacaatttagaataactaagactgtagaattggtttgtaatacaaaacataaaagccagaggttataggtaccttatttatcacaatgtgattattatatattgtatgactgtatcaaaatatgccatctatggcataaatgtatacacatattatgtacacacaaaaactaagaaaaatttaaatgtaaaaaaaatttaacctgcaggaaccatattctttaacttatttgcagtttaaagccactgaaaaagaatactagagatgttagtctattatgttaccaaatagtgtattgttaccatcttttaaatatacccttaagtaaggtggaataggttaaaactagtggcataataacactttattgaatgtataacagtatttaacatgttataaatgttgaaataaaaaattaacacataatctaaaactttaaaaatgcaattttatcacataaaagtacaattaataaaatgacatactaatttaattaattttaactataaaatatgttattctctcataatattctctcataatactacattagtacatcacttagagccaggtgcagtggctcacacctattatcacagcactttgggaggccaaggcagacagatcacatgaggtcaaaagttcaagaacagcctggccaacatggcaaaaccttgttttactaaaatacaaaaattagctggatgtggttgtgggcacctgtaatctcagcttcttgggaggctgagacaggagaatatcttgaacctgggaggaggagcttacagtgagctgagatcataccactgcactccagcctgggaaacagagtgagattccctctcaaaaaaaaaaaaaaaaaaaactctgaatgcctacctcatacatcactcaattctataagttaatcacaaatagccttcctacttagattttcatcgtgcatcttacattttaatgtccttagtcatccataagaaatgtcataatgaccatgtaaaaagtctcccaaatctttgatgcagaaagaattgatcacatgcttttatatgggaatacaagagaaattaagaaatagcatgaagcaatttaagagttgaattccgtcattattcagtttccaaataagcttttttttttcttttgagacaatctcattatcacccgggcttcagtgcagtggcaaaatctcagctcactgaaacctctggctcccaggttcaagtgattctcatgcctcagcctcccaagtagctgggactacaggtgtgcaccaccatgtttggctaatttttgtatttatttttagtagacatggggttccaccttgttggccaggctggtcttgaactcctgacctcaggtgatctgcccatcttggcatcacaaagtattggccttacaggtgtaagccactgtgtctggcaaaaaaaaaaaaaaaaaaaaaaaatcggtatttttaagataaaagtatactttaaatgtaaatgtaactcttcaaaggtctacttctttcaaagtcatatacaaataatttttctttttaacaactttagttttggattttttcctatactcagcagtctgatttagtgtaatgtctgaagtttgagagataggtatttctactgtgaattatctatatttacataaacaattttggattaaatatttttatatttactgtatctgcaaaaatatattttagtataaactcttttgtgttttataattctgtagtttttgtaaaaatgtttttccaaatttattaaatttgcacggtcattcaatataaattccctgatgtttagcaaagttggaacaactacctaaggttttcctgtagtacaaaatgtgtacaataaaatctgtgatacaagtaaaggcactacaaccctctttatatttgtaatgtttttcctcaaaataaatattcttctgtattttaagggcttttattttctgaaagatctagtgacaataattgtacttttaatactttatttaatatgaactctctggtgttgaataagatgtgagaagatattagtggcattcacaatttttttttcccagtctctctgttgcccaggctagtatataaatgctttcctttgcaataaggcatgagtattggttaaatgtgtgccacattgtttattctagtagttttctccagtatattatcttacctacaatcaagtgtgacagccatttaaaggctttgtcacattcttcacatttctaggatttctcattcatatgatttcttttatattcagaaaagtctgaggtgttgccaaaagcattgtcacatctttcaggtttgtagagtctctcatgtatgaattagcctatgtttcttaagaattgaggatctgttagaggctttcccacattcttcacacatgcatggtttctctccagtatgagttgtcttatatgtagtaagccttaaggactggttaaaggctttgccacattccacacaattataggaattccctccagtatgaattacatgaatgtttagtaaggattgaggaacagctaaaaggcttgccacattcttcacatttgtagggtttccctcctgtataaattcccttatgttcagtaagggttgagaactaatgaaaagctttgccacgtttttcacatttgtagggcttttcctccagtatgaattcttttatgagtagtaaggtgtgaggaacagttgaagtctttatcacattcttcgcatttgtagggtttctctccagtatgaattctcttatgttccacaaggtttgaggaccggttgaagcctttgtcacattcttcacgtttgtagtgtttctctccagcatgaattttcttatgtgtaataaagattgaggactgtttaaaagctttgccacattcttcacctttgtagattttctctccagtatgaattttcttatgtttactagactgagaatcagctgaaggatttaccacattcttcacatttttagggattctctccagtatgaattttcttatgataactaacagttgaggatgacttaaaagctttgccacattcttcacatttgtagggtttctctccagtatgaattctcttgtgtctagtaaggcttgaggatctgctgaaggctttgccacattcttcacatttgtagggtttctctccagtatgaattatcttatgttcagtaaggatcgaggaccagctgaaggctttgccacattcttcacatttgtagcgtttctctccagtatgaattatcttatgtttagtaaggattgagaacgtactaaagcctttgccacattcttcacatttgtaaggtttctctgcagcatgaattctcttgtgtttagtaaagcttgaggaccaggtgaaggctttgccacattcttcacatttgtagggtttctctccagcatgaattctcttgtgttcagtaaggcttgaggaccagctgaaggctttgccacattcttcacacttgtagggtttctctccagtatgaattctcttatgttccatgagctttgaggatgagttggaagctttgccacattcttcacatttgtagggcttctcttcagcatgaattgccttatgtgtattaagggttgagaccttactaaaggctttgccacatccttcacatttgtagggtttctctccagtatgaataatcttatgtttagtaaggattgaggatcgattaaaagctttcccgcattcttcacatttgtagggtttctctccagcatgaattctcttgtgttcagtaaggcttgaggaccagctgaaggctttgccacattcttcacacttgtagggtttctctccagtatgaattctcttatgttccatgagctttgaggacgagttggaagctttgccacattcttcacatttgtagggcttctcttcagcatgaattgccttatgtgtattaagggttgagacgctactaaatcctttgccacattcttcacatttgtagggtttctctccagtatgaattatcttatgtttagtaaggattgaggatcgattaaaagctttgccacattcttcacatttgtagggtttctctccagtatgaattaccttatgtttagtaaggattgagaacttactaaaggctttgccacattcttcacatttgtagggtttctctccagtatgaatactcttataataagtaagggttgaggaccagttaaaagctttgccattttcttcacatttgtaggaattctctctagtataaattctttcatgttgagataggtgtgaaagcatgcaaaatgatctgacatattctttacatttcaaacctttctctccagtatgccttatcttatgtctgtttgaatttgaacatttatgaaagacgtttgcatatttgccacattgaaatactttgctctgtgtagttgttaaactctggttaagtttattataaccttctttgtgcacgttacactcatccacattggtacaactaatttttaagtgtaaattctcatgtccacatttgtcatatcttctcaatatcattttttggaaagaatcttctatgccttgctctggccaaaactcttgggaaaaatgagaacatataactgaaaagaaataaaaataacaaattaatctacatattagactcagataagtacagtttccaaatctaacctataaaattattcaaactacataagcaagacgacattgcaatatgacacaggccctaattcttcatagatatataaatgtaataaaaacatatagaccaaaatacatatgtgaataatttatacatgagttaagtgtgtgcatttcctcaattaagcccaatgcaaagagccacatagaaaacaagaaaagtttgttaaatttacccaatacaactctttctgctcctcaatattacctagtcccttcagaagcaaattgtccatttctgatttttttttttttttaaggaaagtaaaatattgacacatccaatttaatttttgtcttctatggctctttccacacactggtttctgtctctcatgacataaagtgctgaaatacatggtggtatactttgaaatgaaagtttgagcctgctgagatcaaaggtaaatgcactgcagcagagcactgcagtgccacagagagagtacaggtgtaccaagtgattacttttcagaagaaacataaatagtctcttttaactaaaaataaacacaaaatttcagacaagacaaacctgaagatgtttgagagacccacataatctctagccaagaccattattttctgactatgccaggacaaagctacattataaattttgtgacaggtggcctttttaaatgtccaaatctcaaagattacagtctatacaaaatagggcaatataatcttatcaaaaatattataaagttttcagaaagaaaccattgaaaatgtatatactaattttaaaaattgaatagcactcaatgagtgaagcaggaacacaaaagactatagaaaatgagaaaaatgaggataagaacaaaaataaccagtgaattgtcaacaaaagatttgcaggatagaagagaacagtgtgatatagtcaaagttctaaaaaaaaaaaaaaaaagcaaacaaaaaaaagaagctataaagtgagaataaataccatcagcaaatctgtcctgcctaaaagaaaaaaaaaaaaagagctttcaaaataaccaaattcttaaaaagtatattttgcactgcatacgtcttccataggaaagatgctgaaagtagttcttaccactgaaaataacataatgtaagaaaacaacacctagtcatataaaaatacattattttctaggaaagatatgcacacacaaaaaaattgaatttctagcattattctaatggtgcagaaaacatttttaattattctctaacatttgagagataaaagcacaggaattattataaacatctgttaatgaatatacaacataaatagataaacttagcaacatcagtgaaaaatttaagagcagacataataaggaggacttttttatgcaactgaagttaatttttcacctgattaaaatatattgttttatttttagaggttttatgtaatccccaagataccacacaaaaaaatctgtatacatacacaaaagaaaaataagaaaatgaaagcatatcaatacgaaaaccagaaagaaacaaaggaagacagaaagagaaaatgagggacaagatgaaagaattaaatagaataggtaataaaataaaagtaactcctttactttcagaaaattatttaaatatacggaaaattaactttcaaatcaacagaattttaatagatttattaacattttttcttttgagacaaagttttactcttgttgcccaggctggagtgcaatgacactatctcagctcaccgtaacctctgccacccaggttcaagcagttctcctgcctcacactcccgagtagctgggattacaaaagtctaccaacactaccagttaatttatgtatttttagtagagatgaggtttcacaatgttggccaggctggtctggaacccctcacaccttgggtgatccacctgccttggccacctaaagtgctaggattataggcacgagccgccatgcccaggttatttaaaaaattttaaatatcaagatccaacttgcctttctacaagagtcagttgaaatctaatgttaaaaagactcaaagtggcaagatggaagtagacatttcatgcaaatattagtcaagtgagagcagaagaggtcaaaataatattacacaagctaaatcttaagtcaaagactcatattttataaaatgcacttgacaatgaaactccaaagagacaaagaaagatattaaaaaataatagattaactgggaatctgtgaaaaatctgaatgtgtgtatgtgtgtgtctcacattaggattacaaatatataaagcaaatattgatagaatagaagaaacacaaggagatcaatataattatagtaggatattattataccacactttcggtaataaaaatgaaaatagaggaggctggcaagatggccaaataggaacagctctgatctgcagctcccagcaagactgacacagaaggtgggtggtttctgcatttccaactgaggtacccggtttatctcaacgggactggttgaacagtggatgcagctcatggagggtgagccgaagtggggtgcagtgttgcctcacccaggaagtgcaaggggttggggaactccctctcctagccaaaggaagggtttagggactgtaccataaagaacagtgctctccagcccagatactgtgcttttccatggtcttcacaacccacagaccagaagattccctctggtgcctatgacaccagggccctgggtttcaagcacaaaactgggaggccgtttgggcagacaccaaactagctgcaagagttttttcttttttttccccataccccagtatagtgcccagaaggccagtgagacagaaccattcactcccctggaaagaaggctgaagccagggagtcaagtggcctggctcagtgggtcccacaccatggagcccagcaaactaggacccactggcttgaaattctggctgcaagcacagcagtctaagcttgacctgggaagctcgagcttggtgggggaagggcgtctgccattgctgaggcttgagtaggcagctttaccctataaagccacccagaagattgaactgggtggagcccaccgcagctagcaagaccagactgtatctccaggttcctcctctttgggcagggcatctttgaaaaaaaaaaaaaaaaaaaaaaaaaaggcagcagccacagtcgggggcatatagtaaaaacacccatctccctgggacagagcacctgggggaagggacagctgggagcacagcttcagcagacttaaacatccctgctggacaactctgaagagagcagtgcatctaccagcacagcgttcaagcgctgctaagggtcatactgccacctcaagttggtccctgacatccgtgtctcctgattaagagacacctcccagtagaagctgatagagacctcatacaagagagctctggctggcatctggcaggtggcctctgggacaaaccttccagaggaaggaacaggcagcaatctttgttattctgcagcctctgctggtgatacccaggaaaaagggtctggagtggacctccagcaaggtctagcagatctgcagcagggaggcctgactgttaaaaggaaaactaacaaacagaaaggaatagaagcaacatctacaaaaaggatgtttactcagagacaccatccgaaggtcatcaacatcaaagaccaaaagtcaataaatccataaagatggggagaaaccagtgcaaaaaggctgaaaattccaaaaaccagaatgcctattctcctccaaaggatcacaactcatcaccagcaaaaaaaaaaaaacaaaactgaatggagaatgagtttgacgaattgacaaattcaaatttgcaaatttcagaggtgggtaataacaaactcctccaagctaaaggagcgtgttctaacccaatgccaggaagctaagaaccttgaaaaaaggttagaaggattgctaatgagaataatcagtttagagaagaacataaatgacctgatggagatgaaaaacacagcacgagaactttgtgaagcatgcataagtatcaatagctgaatcgataatgcagaagaaaggatatcagagattgaagatcagcttaatgaaataaagcaagaatacaagattagagaaaaaagaataaagagaaacaaacaaagcctccaagaaatatgggactatgaaaggaccaaatcttcgtttgattggggtacctgaaagtgatggggagaatggaaccaagtaggaaaacactcttcaggatatcatccaggagaatgtccccaacatagcacgacaggccaacattcaaattcagaaaatacagagaacaccacaaagatgctcctcaagaatagcaaccccaagagagagaatcgtcagattcaccaaggttgaaatgaagaaaaaaatgttgagggcagccacacagaaatgtagggttacccacaaagcaaagcccatcagactaacagtggatctctctgcagaaaccctacaagccagaagactggggggccaatattcaacattcttaaagataggaattttcaacccagaatttcatatccagccaaactaagcttcataagcgaaggtgaaataaaatcctttacagacaagcaaatgctgagagattttgtcaccaccaggcctgccttacaagagctcctaaaggaagcactgaacatcaaaaggaacaactggtaaaccagccactgcaaaaacataccaaattgtaaagaccatcgacactatgaagaaactgcatcaactaatgggcaaaataaccagctagcatcataatgacaggatcaaattcacacataacaatattaaccttaaatgtaaacaggctaaatgccccaattaaaagacacagactggcaaattgaataaagattcaagatccaacaaagtgctgtattcaggagatccatctcacatgcaaagacacatataggctcaaaataaattgatggaggaatatttaccaagcaaatggaaagcaaaagaaagcaggggctgcaattctattctctgataaaacagatgttcagccaacaaagatcaaaagagacaaagatgggcattacataatggtaaaaggatcaatgcaacaagaagagctaactatcgtaaatatatatgcgcccaacacaggagcacccagaatcataaagcaagttcttaaagacctacaaagaaacttagattcccatactgtaatagtgggagactttaacaccccactgtcaatattagacagataaatgagacaaaaaactaacaaggatgttcaggacttgaactcaagcagacctaatagacatctacagggctctaccccaaatcaacagaatatacattcttctcagcatcacatcacacttattctaaaattaaccacataattggaagtaaaacagtcctcagcaaaagtaaaaaaacagaaataataacaaacagtctctcagaccacagtgcaatcaaattagaactcaggattgagaaactcacgcaaaaccgtacaattacatggaaaattaacaacctgctcctgaatgactacagggtaaataattaaatgaaggcagaaataaaaaagttctttgaaaccaatgagaacaaagacaaaacataccagaatctctgggacacagacaaagcagcagtgtctacaaaatttgtagcactaaatgcccacaagagaaagcaggaaagatctaaaattgacaacttaaaatcacaattaaaagaactagagaagaacaatcaaattcaaaccctagcagaatacaagaaataactaagaacagagcagaactgaaggagatagacacaaaaaacccttcaaaaaaatcagtgaatccaggagctattttttttttcaaaaagatcaacaaaatagatagactgctagccagtctaaaaaggaagaaaggagagaagaatcaaatagatgcaatcaaaaataataaaggggacaccgccactgattccacagaaatacaaactaccatgagagaatactataaacgtctctatgcaaataaactagaaaatctagaagaaatgaataaatcccaggacacatacaccctcccaagtctaaatcaggaagaagtcaaatccctgcatagaccaataacaagttctgaaattgaggcggtacttatgggcctaccaaccaaaaatgtccagaatctgatggattcacagcctttgtaccagaggtacaaagaagagccgattctttctgaaactattcccaacaatagaaaaagagggactcttccataactcattttatgaggccagcatcatcctgataccaaagcctggcagagacacaacaaaaaaagaaaatttcaggccaatatccctgatgaacactgatgcaaaactcctcaataaaatactggtaaaccgaatccagcagcacatcaaaaagcttatccaccaagatcaagttggcttcatccctggaatgcaaggtttgttcaacatacacaaatcaataaatgtaatctatcacataaacagaaccaaagacaaaaaccacatgattatctcaatagatgcaggaaaggcttttgacaaaattcaacacctttcgtgctaaaaactctcactaaactaggtagagatggaacatatctcaaaataataagatgtatttatgacaaacccacagacaatatcatactgaatgggcaaaactgtaagcattccctttgaaaactggcacaagacaaggatgccctctctcaccactcctattcaacatagtattggaagttctggtgagggcaatcaggcaagaaaaagaaataaatgatattcaaataggaaaagaggaagtcaaatagtctctatttgcagatgacatgtttgtatatttagaaaaccccattgtctcagcccaaaatctacctaagctgataagcaacttcagcaaagtctcaggatagaaaatcaatgtgaaaaaatcacaagcattcttatacaccaataatagagagccaaatcatgagtgaactcccatttacaattgctacaaagagaataaaatacctaggaatacaacttacaagggatgtgaaggaactcttcaaggagaactacaaaccacagctcaagaaaataagagaggacacaaacaaatggaagaacattccacgctcatgcataggaacaatcaatatcgtgaaaatggccatactgcccaaagtaatttacagattcaatgccattcccatcaagctaccatttactttcttcacagaattagaaaaaactactttaaatttcatatggaaccaaaaaaaaaatctcacatggccaaggcaatcctaagcaaaaagaacaaagctggaggcatcatgatacctgacttcaaattatactacaaggctacagtaaccaaaacagtatggtactggtatccaaacagatatatagacaactgaaacagaacagagccctcagaaataacctcacacatctacaaccatctgatctttgacaaacctgacaaaaacaagaaatggggaaaggattccctatttaataaatgatgttgaaaaaacttgctagccatatgcagaaaaatgaaactggaccccttccttacaccttatacaaaaattaactcaaattgatttaaagatgtaaaagatttaaagatgatgtaataccccaaaccataaaaatcctagaagaaaacctagagaatactactcaggacacaagcatgggcaaatacttcatgactaaaagagcaaaagcaatggcaatgaaagccaaaattgacaaaagggacctaatttaactaaagagcttctacacagcaaaagaaactatcatcagagtgaacaggcaacctacagaatgggagaaaaattttgcaatctatccatctgacaaagggctaatatccaggatctacaaagaacttaaacaaatttacaagaaaaaaaacaaacaaccccatcaaaaattgggcaaaggatatgaacagacacttctcaaaagaagacatttatgcagcgaacagacacatgaaaaaaagcacatcattactggtcattagagaaatgtaagtcaaaaccaaaatgagataccatctcacaccagttagaatggagatcattaagaagccaggaaacaacagatgctgcaaagatgtggagaagtagaaaagcttttacactgctgagtggagtgtaaattagttcagccattgtggaagacaatgtggcgattcctcaaggatctagaactagaaataccatttgacccagtaatcccattactgggtatataatcaaaagtttataaatcattctactataaagacacatgcacatgtatgtttactgcagcactattcacaatagcaaagatttggaaccaagccaaatgcccatcagtaatatactggataaagaaaatgtggtacatatacaccatggaatactatgcagccataaaaaaaatgaattcacatcctttgcagggacacggatgaagctggaaaccatcattctcagcaaactaacacaagaacagaaaacaaaacacagcatcttctcaaatatacaggaatttaacaaaacactcgagcacgctcttatgcaaaggttgtaataatactgtaaagatgttcatcctgctcaatgtaatctacacagttaatgaaatgttcctcaaatttctcactgcatttttgaaaaaatagaaacagcaaccctaaaagtatatagaatctcaaaagacaatacccaacaatcttaaaataataataataataaagcaatgttgcaggcattaaagttcctgatttcaaaagacattccaagctacagaattaaaacaatctggttaagtataaggatgaaaaattagactaataaaatagaatgcaacatatatatatatatatatatatatatatatatatacatacacactttaagatatatggtcatatgaggagtcatttacatagcaataattattactgtaaactaataaaggcaatgcaaatttgttaccaaatcattcagtaaatataatttgaaatataaaaatactggaatatcactcagttttcaaaagcagaaattataaagcaattataaagataaatcttgataacattatgcaaaatgaaatgagtcagccataaaaagacaaagattctatgagatagatagatataaagcaattacactcttagaaacagataaaaagaaaaaggtcccctatttgcttaacccccaacagcaagaaagtctgtcagtcatccacgacaaaaatgtcttaatgagagaatcagacatcatggttaacatctgtaatgacagctacatggtatagaaaggttggagaattgctgcaggccaaaactttaagaccaacctgggttatgtagtgagaccttatctcaaaaataagtgcctttaagagagctttgagatccagtgagggaattgtgaaactttgctaaagcccaagattgaggagcacccttttcagaaggcaagctttcattcaggtggcaaactagaggacccctgctcttgactacagaccagaaaatgtcccaccctacttggtcccacagagaattttgaacttactctgtaaccatcccaaactcctcccagccacagtctgtgagaggtcttggtcctccagaggcttggagactgatacccatttagagccatgctggcaggcctgcagaccttggtccttactgtcgtcccaatagcagttccatgactcagttccagcttcctaagccacagttcatggccagttctgcctacatagaatcccacagtgacctcagaaatcctctctggtactcaatgaaaagccatactaatccacatcctaatataaagcccaccatatgcagacttgactgtagaaacctgccctagcgtctaccctactgagcaacgtcctgaaggatatttactctgtccaaaaataaaatgggaattacaactgcccaagccccttgtaataagccaaccctagtgcagagccagcagccttgtgaccaagctacaaccccactctactacaaacccagagggcattctatcaccctgggggccccaaaaaagaagatttttaccctctgaaaccagtttataaaaattttaagaggtgtttactccttcaaattcagacaccaatgcaaaagcatactgtgccactgacaatgcttctatcttaacacagcacttgaagtatgtggaagaaaaattagtcaaaaaaatttttaagtcactgaaattgaaggcaaataagtaaaacattgctgtttgtagatcatgcaatgttctctataaaaaaccataaacagtacattaaaatcttttcaaactaataaatacactcagcaaattagcaaaatataaaattaacatacaagtataagttatgattccatacacttaaactatctgataaaatagaaaaagaaaaccatcttatttacaatagcactaaaataataaatatctgagaacaaatttaattgaggagctgaaaaacttttcaaggatttatcaatgaaaaatgagagaacacaaataaatttaaatatattttatgtctatagattcaaataaatgttaaaatatcatattacccaaagtgatctctagattcagtaaactctgtcaatattccagtgtttttctttcacagtaatgaaaaatacaatcataaaatttacatgaagctacaagaaactgtgaatagccaaagcaatcttgaggaaaaataaaaaagcagaaggatattatactttataatttcaaactatatttcaagactatagtaataaaaacagaatgaaatgtgcagaaaaatgaaccaaaaaaaccccaatgatacagaaaccactactctcacacacttcagagatgatggaaaaagagaacttaaaagatagtttaacatggagtaccttaaaattacgcggatatctatgtgtccacaaaaacaaaaaaaagtcagattgcactctcttgtatgccatgaacagtactttggctatcactgtaaacttgaaggaaaattacttaagggaaagaagaattcttagaaattttaaaagcataagttagaagatgcccctgtgtgagagaaaattaaaaaataaaaataaaaattagctttccagaaacaactacttttggaacacagcttcccaaatgactttaaggactggcttcctcattgactttggacttctcattcatgttgtctgtattcactctcacctacctgggggttcttccaccatctcatgtctcttcatattccagggctcttttccttgctccagaaaaatgatcaggtctggcttaaaggcagcaatacctgttttattaaaaatgaacaacatccatcttgctcatattctccaattaccaacttagtaatgtgctcagtaaagaggatgtaatagaatattctaatacatttatcccaaaatactaaattataacatgtctgttgaagaaaaacgttatgtgcagttgcttaaagttctgttgaaacagtctggagctcaagttaattcacaaacattaagcttcttcagaaggttattgcgcataacccatggtttctgcaggcaggtactctcactgtggaaaactggaacagagtaggagatggattgaaatgggttcgtcaaaaaggtcttaaaggagacccttctgtgttttctgcttggggtttggtttgcacggtcctactgccgctgtctccttcttattttgtcagacaacaggagtcaggttttgagtctcaagaattaaaaagataatttcttcctccaacagcgcctattgaaaataatgagcaggagaaagggaagaattgtccatttgctaagcaggaaaaaggagaggagaattggcctctgctaccccctccaataacagaagtagaaactcccatacaaaaaattttgcatgctgatgctgcggctagggaacctttaggaccttgtgcttttcctattactgtgaggcctgatccaaacaatctgcaacatcttttacatgagcacactcctgtacagtttaaattactgaaagaattaaaagctagtgtggttaataatggagtgcaaagcccattcactatagggctgttagaattggtgttcagagccatgcacctcccactctttgatataaaacatttgggttgcacttgcttatccgccagtgcatacctgatatggagcttaaactggcaagaaatgtgtgcagatcaggctaggtagaatcacactgctggtcaaggaaacattagagagaaaatgatgacaggcaatggcccattttcagatctggtacaataattaacattcccagatgctgcttaccactggtctgccttagccgccaagcatgcttggagcacaattcctgaagagggagttccagtgcagtctttctacatgtcatgcagggatcatgagagccttatgcacaatatatcacatggctgcaagaggcagtgtggcatcagatccctaatgcccctgctgcagaaatgcttaccataattctaacctatgaaaatgtaaatgcagattgcaagtgtgcaatggctcctgtgagatccacacaaagcttggggaattaccttaaagcttgtcagaatgcaggaactgaatttcattgttctacaatgttagcacaagcaatggctagtttagtagttgacagatctaaaaggagccaaggttcaaaccctaaagtgggaaaatgttacaactgtggaaaaactggacatttcaaaaaggaatgccaccagatctcaggacagaaaggaccttacaatgcggtgctccccaccccgagcagaaaaaacaccaggattctgtcctcgctgtaacaaagggaatcactgggctgtaacaatggacatcattgggcgaatcagtgccgctcaaaatttcatcataataacacccccgctaggaaacaagaaggggccctggacccagtcccctcaaacaatgacggcattcccagttcaggccacaaccccacttcaagggttggtcccaggagaaacattgattccctctccccaggaacaccaggaagtgcacgattagatctcccagtcagagaaagaattacattagttataggagacaaacctaccaaagtacccactgtcatttggggacctataccagcaggatacatgggactaattttaggcaaaagctgccttaacttgcaaggcatcactgtaatcccaggagtagttgactccaattataaaggagaaatccaagtagttttaatgtcacaagatctttgggtttttgaaccaggggaatatatagtgcaattattgcttatgccctgcaaattacacccttttccacaaaaggagaaatgaggaaataaagggtttgggagcacaactacatgagaaatctatccatcacaactcatagcctctaacagactcacctgtgtagtacaaactaaaggaaagaaattttatgggcttatggaaacaggagccgatgtgtcagtaatacccagtaaggattagcccccgtcttggcacattttgggtcgcatccctgggctatggatttctaataatctgtccaagccttgggctgccacccctgctttgcactttgtgaaacttcttctaactcaacttacttatcgtgtccgcagacccttaggcatgataatttttgctattgtttccttggtcacactaataacttctattgtgatgtcctctgtagctttgcatagttctattcaacagctcagtatgtggagaactggatgcagaggcatacagccaaccaagcatggctactaaagaataaaattaacactgagttataaacaagtggcaatgttgaaatccatggttctatggttaggagaacaattacaaaacttacaattgaaagagcaattgtgctatcatttaaatcacactcatatatgtgtaaccaacgtagaatataaccaaagcgagtatccatgggaccttgtgaaagcccatttgcggggagctttcacacccaacatcacctttgatactggtgaattacaaaacaaaattcttgatttaaataagcaaactcaagagtttcagccttctttagaagactggaccgaattccagcaaggcctggagagcctcaatccttggacctatctaaagcaccacacaaacatctcatatgtagtttttggagtaatgctgttctgtctctgttttctgttcatagtctgtaaaatccgacggaccaatcacaaaatgagagctgcccaacctggccttacgtttatttgattaatgcataaacaggaagggggaaatgttgggagctgaatgcctgagtgttgtgaccaactcagcattccactggaggctatatgatcaaacagcaaactgtttatcatgagtgcagaatgtgggcaaacttgcttctgctcctgccaccagaaggtatactgaggacagtcactccctggtgccatgctccttggagttatctactggaacatctggagagtactgttcaaagaatacagtcatgcaggcctgcattaagtcaagcagctgaccacaacctcccccttctccctatctcctttactcaataaatacaaagggctatagaagctcaggacccttgttcaccagaagcaaggagtccacgaccccttcttccaaatatactcttttgtctttgtctgtattctcgcattcatcctcctttgttcagtccaataaggtctgcagcaaaatgaaacctgtagtatatactaggaattgcgtattaaagttattctcacccaggaagaccaggtttctgtagttctctaacatcacattcctatataaattctgctgtgtagaatccaggcattgccactcctccagagagaattctatggccacatccctaaatgtcaatgctccctggaaaacacacacaaacacatatatttaccaattggtcatgggcagaacttttaatgtgactcaaggtaaaatggagagagtagagagagctggttctgacttatatgaatgactgaaattattcaataaaatagttttcaacacagaaatgttcactaatgtattctctaactctgagaaaagaaagtggtataagatccataacatctgtgtatatgtaatatttttctagataataaagtataaaattgagggcaaaaacactaacatgtacaattttgagtgctatatttacatcatacagaattgtgtgccaggcatggtggctcatgcctgtaatcccagcactttgggaggctgaggtgggcagatcacctgaggttgggagttcgagaccagcctgaccaacatggtgaaaccccgtctctactaaaaacacaaaattagccatgcatggtggcacatggctgtaatcctagctactcgggaggctgaggcaggagaattgcttgaacccaggaggcggaggctgcagtgagccaagattcattgcactctagcttgggcaacaagagtgaaactccatctcaaaaaaaaaaaaaaaaattcatcgtgtgtatttttcagatggaaaagacatagttttgcatattattcagatggaatagacatgttgagttagaaggtatgactcaaattttaatgtgtgcaataagctagagatcctgttaatgcaattttttttttttcagatctgggataaagtctgagttgctgaatttctaataagctcatcagtatgccaatgtttttggcccaaaaagactattttttaaaacatccagtaatagaatgagcctgtgtttttctgtttttctggtttgtaaacaaagataagagccttcattttccaaaaacagacaaatgcaaaggaaacctaagaaagaagggcagctgtcagattaaatgttttggtttattcacatcagctgcataaagatatttaatgatgaagaggaaaatgattaattccatagtaaaaaaatgtgtcagagagcttatcaaccaagtgatttattaacatcaattacactagaacacatttttttaatgtcctgatgtacccagaaggacacagtattactgctgagatattgccccccctctgaaaggtaaattatagtctgaatttaaccataaggaaacattagttttatggaaagttcaagatagagatatctcccatgttctgtaacttttagtagtgattttaaatagtatttcttcagcactgagagagcaggtatctcctaacaattttttttagaattttctgggtaataaataccacactgcttcaatgagtgttttcttaatcttgtactgcatagacataataaagaacacagatgaaaccacaacattacatgttctctgtcttcactaaaaaccccaggttttccccaatatgaattttgagtatctacactttcccatgttcaacagccacaaagggacatttttaatattgcagattataaattcatagtgagatttctgcatggcatataagaagccataatatagagaaagctctggtatatagaaaaaaatatatttttcagagactttgattattgtaagaattttttaaagcagttaagacaaactcattagggaggaaaaacacaggtacacagaagtacaggtttgcaagtactaaacgtatgtttcctggaggaagaatagtggacacagatcttgatctcagacatgtttaggtgaaaaagaaaaggccatttttttctctttctcctccttccctaggattctttctcagataaaattttctagacaaattacacctgcatcttgagaatatgcctttaaaagtgtcagcaccacaggtctacctgctgtcaccacatccacaggcagaagaaccaagacagaaaaactccatccatttctgtcctttatagcagaagagatgaagaaacaatgagtagctccacagagataaaaatatgcttttctttattttgtcctcaggagccatcccctgacacaggcaccagcaatttctgccacagtaatgtaaatatgggccacggtgtactgtccctaccaaatccaaacagaacaggttcttggaccaccctttaatgcaaagatggaacttaactctcatgaatgtattatgaattcctcatacttgattctggcctcaccttagagtcacatgagccacttaattaaaacaacatgaatgcttccaccaagaacaataaacagaatccatggaaagggcacaagtaaagagagttctgcaaaatggccaggtgatactaattagaagcctgggctgataaccccttaactaagcatttcctctcaagctctaaggagcttataaatgacttggtaattttggccccactctatgaaatgtaattctgcaggtatggaaagggtccataaatgggtcacttaaacaagtgcgctgtcaataatgatgttgctcccactgggcttattattagcattaattagagaaatgaggcagaacacagatacttctggtacaaatgaaaacaatcattcttcatcctaaagtattatattatttgctgactctttaaaatttacagagaaaacagaaagcagcaatttctgagtaagtcagcatttggaaaacaacgtgtgcacatgtactaatgcaatgtttattaagcaggtactatgtgctcaataggatgttagagtactgtgatagcacattatgtgatttaatcctaataacaccctttcagttgatactaagtgttcaataattccaaggctttaaaggacccagcatttttatttctatttgtttatctgtcattgatttttcaaaaaatgcatagaataaaagctaactatagacagatgaaagggatacagatggaaagagcttaataaaatttagataaatttttattgtgtttatatttactttcttgtgacttgtgaatcaactgcaaagaatagaaaacagaacagaaaacagaaatcagctgcaggaacagaaaacaagttgctaaataatgtctctgcaagcactggttttaattaaaaatttgtaaagtaagattctataatacatactttatatttcccatttatctgcttttaagtctcagaaaatgttgaacaccagctctaaaaaggcaacagtattcatgacccaaaactctgatctcttctaatcagttctttgaggcaagactccagggtagggccagacataaataaggcctccaaaaagggtgaatatgaacagggctggggcagagtgtagagccaatgtacaattctgttctctatggcactggggggtattgtaagttctttttttttaaatcttacttaagtaaacttaaatctgagtttgtataattttaatcttttttagccactgccctgtaaattttatattacatactaataagaaatttaaaaaaaaatcccttaaggttttctataataatttttttagaagaaaaataagtattcttagcagggtaaaagaactacaaataataataacaactcttccaattataagttcaggtgtagacatcagaaaccacaatataaagaaagtggctcaaataaagcccaagttgttttttgcacatctatttattgtacccaccatatgatgcataattcaaccatttttccagttgttagtttagactaaaacttccaggatggtaggaatcatgactgcttcatcaatttttttttttttttttttttgagactgagtctcactttgttgcggaggctggagtgcaatggtgtgatctcggctcactgtagtctccacctaacaggttaaagagattctcctgcctcagcctcccaagtagccaggactacaggcatgagccaccacacctggctaaaatatgttggtttattcaacacattattcaatattattcaatatggtgaaatccctatttcaccatgttggccaagctggtctcgaactcctgacctcaggtgatccaccatcttggcttcccaaagtactgggattacaggtatgagacactgcacccagcctgcttcttctatttttttttatgactatatgaaattgaagcaattagtttatctctttgagcctccagacctcctgattttttactcaagtaccagggatctgttctggacattctcaaatgtctcagagattcgtaggtgattgtgagagggttcccagtgaacctgggctgatggtccaatgataagacagacagagaagactcaggatgattctaaataaaaaatggaactactttggctgaactccagaatctgggttgcctgtcctgatttgctagctgttgggtaagtagaaggacaagaatactctactccagtatcacattttacaagtaggtatagttgtggtgtggctctggatactttgtggccttaagatgattgtttacacttacagattctgccatcagattctatttactcctggagcctctcacataactggggcaggttaatgaagatgtgaaaggtcaaaaggccacactctcaaaaaaggaaattaaaatgtctatgttgatatctcacaatgcagaaaatgcctcctgttggttttctgtaaattctcaatccaaagtctggctttgccttgtaaattccaggcagaggccaggtcttatttacaaattctaggtgaaatcaacctcactctgcatttttgggtgttacagcaagtaaagtgaaatgaaaggagagatcccctcttagaggctgctctagaacattctaaataatattttacctgaaaaaagctgacacaacatgaacataagcagacagtttatttgggtcaagcttaaggattttaacttgagacaaaatattcaagttgcctggaatctacactttcattagcagcacttacaagtggatttgtaaaggcaaaaaaaaaaaaaaaaaaaaaaaaaaagaggtacagtgaatgagctgatacgaaattggttgtgagaaattttacttatgtaaagaaataactttaataattgattgcatatacatcaaggttaagggtatggaatttagtgtccagagtggaattattggtctaatttaaagctacttgtggcaatagtgaacagtttcaagagataaatacatagctgaagaaaagggagaaaaacataactgtgctcattttaatggctctctgactttgataactaaaaggacttgcattcctcagataaaaacttttttttttcttttcaattctcaagacctagatttagaatttggagctgcaaattcaggtcctgcatgggtaaagtagcagcaggtggtatctgaatatttgtgggcattatagcatgaggagggagggagaactggattctcacgtctacaggtctactcaatgcacatattttactctgattgggtttctgtgccccatggtcactgaatcagtttcaggtctgaagacacaagtcattgaaagaggtaaaacggttaatatctgacctataaagtttgtagaaatctgttctagcctctctaaaagtgactgcagaggatgatagataccaagtaggcagagacacaattccacctgcatatttagggtacagcatgcacttcgcagcacaattgtgaatggactggaagcctgagtggaaaaggcccatctatagtaaagcttagttggtaccctatgtgtttatattatgtctggtaattctagacaaggtttggaaaatacagttagaagcaaaattttcttcagccccagaggaattaaataataacagaacagaaagaaaactgttttattacacaattacatgtgaatgtgacatgcattacagtcaatttgctcaagagattgcaaagacagaaagacagtcaccataattcatctacaagtagaatttacagcaccatgtcatacatagttcatcctgaattcatctggtagctgggaaggccatccctgtatgctaactggttataatcaatgacaaagtaaagctttcacatcttcatgactagaggtagttttgcaacttgaaccccagggcctgctgaaggtaggctttgactcttctacaaaaagtgttgattcgggtgctatctttttggctatttacattttaaagcaatagctctctactctctgagcactgggctagaacactcctgctttccctctcttggtggctagtgtactctcttgaccccaccatctgccactgaggcacagcccacagcacagggctcacagctggaaactcacatcttaggtgaaccccatttgccacagcagcactccagtgccacatcagacagtgaagcctgagcagcaggaggagagcctgcaggcctcctgggtagaattgcaccttcacaataatagaaaagggagcactgtttcagcctcagtttttatttataatggcggcatgaaaaaaatactgctggattttagcatgagtccagatagagatagctctgagagttctcactgtgacagcccacgtctttcacagacaccacggaatactaatagggcttctgaaacagatacacaatgcattagagagaaaaacagctcttattctgagaaagattatattgagagaaaaaagttaaaagtgtcttaagaaaaaactgagattagatataagattgatcaagtcagccagaaaatatttccctaagaagaatttctctccaaacacccaaagtgcatagctactctcagcaagagaaacatgagcattattgaataaagggggtatattctcagcacaattttttttttttgagatggagtttcattcttgttgcccaggctggagtgcaatggcatgatcttggctcactgcaacctctgcctcctgggctcaagcgattctcctgtctcagcctcccaaatagctgggactatagacacacaccaccacacctggctaattctgtatttttggtagaaacgaggtttcaccatgttgtccaggctggtctcaaactcctgacctcaggtgatccacccaccttggcctcccaaagtgttgagattacaggcatgagccacagcgcctagctctcagcagaattttaaaagatttatcttccatctctgctgctctcttatttcctaaccattgaatgtgagatctacactggaatatatctgacaacttccaccagcacttttttataaaaaattgaaatctgactgtgttaatatagtagaatatattagagcttgcaacatacctaactggagagctattacagtttttgagtagccatatcacctgtctttatttatcctgtaatagcagcatactaatttggtaaaatatatgacactaaaattatgcctacctataatttttcctattgggtaaattaataagcatgtcagactaacatctactgtaacaatttaatggtaaaatttttgggatagcagatatgaatatataagtatgaataattttatgtactagtcataatgtatgtaagattttttaaaattatctgaactataattcagttgaaacactatatttcaaaagtatgaataacaatattaaaataaggaattcaatcaaagtaaatattgtggccttaaatttatactattctagaaaatactgtttaatttacatgaatgcaggttgtctacaaacactacacataactatactaactgtactgaagcaacccaagtacaacagactccactgttcagtttatacactgaactcttctggctttcgcagtgtaagtatttcagcctgcaaataatcaccttggataatcgggtttctgccaaagaacttactcaggatcttttagtctttattattctgtattgctaaattaatccgatctttgtgcttaactttattaggctcttgaaataaattttactctcaacaaatctgtgtctactttaaagactaaagataaaaatatatataatcttttgccaagaaaaaaggaaagcaatgaatctcaggtcccagataaagacaattctgagtcaaaagaatgacaaaaggtttgtttcatttctaatatgatttacatatatttcaaaaagcagaagaaatatatacatataatctaaacctttttttaaaaatcagcaagttatccacccttattttcacatatgagaataaagcctcttatttctcatttatattttctcttacaaaagccaggtctctggacaagttcttgaactcttggacatctgaattttgcacactgtgtgcacttaaaagaatgtttatggggggaaaagcagaagagagaaaattgttataaaaaaaaaccatgggttcacatgaataaagcaaattattagagacctatgaagagacttagaatctgacagtaataatcggggactacatctcacaggcactaatggagagatcattgaagaaaatcaacaacaatattaggacctgaactcaacacctgaccaaataaatagtcctaatagacatctacagaactcttcatctaaaaaataccataacatacattcttctcatcaccacatggcacatactctaaaattgaccacacaatcagaaaaaaaacaattctcagcaaattcaaaaatcccaaaacgatacaaggcacacacacagtttacagcttaagagaaacacaattcaataccaataaaacaactggaaactatacaattaaataaaaattaaatggcctacacttgaataacttttttggtaaataatgaaattaaggcagaaaccaagaagtgttttgaaacaaataagaacaaaaatacaacacaccagaatctctgcaatacagctaaggcagtgttaaaagaaaaatttatatcattaaatcctcagatcaaaaagttagaaagatctcagtttaacaacctgacatcataaataaaagactgagagcaacaaaagcaaatcagcccctaagctagcaaaagacaagaaataaccaaaatcagatctgaactgaaggagatttagacatgaaaaactacaaaatatcaagaaatccaggcattaaatctatttaaaaaaagtaaataaactatgagctagattaatgaagatacaaataaacacaattagaaatgacaaaaagagacattaccactgaccccacaaaaatatactgaagtctgctatgcacataaaaaaaaaactagaataaaaaaattattgaacaaatacatcctcccaaaactcaacacacacacacacacacacacacacacacacacaaaatcaaagccctaaatagatagataagctcaaaaaactgaattagtaataagtagcctaccaactaaatgaagctcaggaccaaacatactcacagctgaattctaccagatgtacaaatagaagctgatattatttctaccagaacaatttcaaaagattaaaaagaagaaactcctccccaactcattatgtaagaacagcaatcattctgataccaaaacctaacagagataaaacagaaaaaggcaacttcaggccaatatccttgaaaattgatgcaaaaatcttcaacaaacagctgggcccggtggctcatgcctgtaatcgcagcactttgggaggccaaggtgggttgattccctgaggtcaggagttcaagaccagcctggccaacatgatgaaaccccgtctcttctcaaaacaggaaaaaattagctgggcatggtagcacacacctgtaatcccagctacttgagaggctgaggcaggagaatcacttgaacctgggagtcagaggttgcagtgaaccaagattgcaccactgcactccagcctggatgacacagtgagactccatctcaaaaaaaaaaaagaaatcttcaacaaactactagcaaaccaaatccagcagcatatcaaaaacctaacccactatgatcaactatggtttattttggggattcaaggtttgttcaacatacacgaatcaataaatgtgattcatcacataaacagaattaaagacagaaatcacaagattatctcaatagatgcacaaaaagccttcaataaaatttaacatttttcatgttaaaaaccctcaacaaactaggcactgatggtatacatgtcaaaatagtaagttatctatgacaaatccacagccaaaatactgaatggacaaaacctggaagcattccttcttgaaaactggcacaagacaaggatgccttctctcaacactcctatattcaacataaaattggcagtcttagccagagcaatcaggcaaaagataaaaataaaaggcatccaaacaaaaagagaggaagtcaaactatccctatttgcaaacaacatgattctacatctggaaacccatatactctcagcagaaaagctctttaaactgacaaacaacttcagtaaagtctcaggatacaaaagaaatgtacaaaaattagtagcaaccctatatatcaagaacacctaggccaaatccgaatcgaaaacacaatcccattcacaactgccacagaaaagaataacatatctagaaatacagataaccagaaaggtaaaagatctctatgacaagaattacaaaacaatgcttaaagaagccagagatgacacaaacaaatggaaaaccactttatgctcatgaataaaaaagatcactatcataaaaatggccatactgcttaaataaatctacagatgtaatgctaattcaatcaaaccaccaaaatattttttaacagaactaaaaaaacaactattttaaaattcacatggaaccaaaaaagagcctgaatagccaaggcaatcataagcaaaaacaagaaagctggaggcattacattacctgacttcaaactacacaacagtgctacagtaaacaaagcaacatggtactggtacaaaaacaaactcataggccaatgcaacagaatagggagcccagaaataatgccacacacctaaaaccatctgatcttcaacaaaggtgacaacaggaatgtgggaagaatttcctatttaataaatggtgccagaataactagctagcactatgtagcagactgaaactggacccttttataacaccatataaaaaaatcaactcaaggtaaatgaaagacttaaatgttaatcttaaaaattataaaaaaaaaaaaaacaaaaaaccctggaagataagaagtgccattctagacatagaaactgtcaaagatttcatgatgaagatatcaaaagcaattgcaaaagttgacaaatgggacctaaataaactaatgatcttttttcacagcaaaggaaactagcaacacagtaaagagacaccctacaaaataataggaaatatttgcaaactatgcttctgacaaaggtttactatccagaatccgtaagaactaaaacaagtttacaagaaaaaaaaaaactaacttaaaagaagaccaaaaaaaaaacatgaaaaagatgtttgtcttcaaaaggagacaaacatgtggctaacaagcatataaaaaaatgctcatcactaatcgttagagaaatgcaaaagaaaaccacaacaagaaatcatctcaaaccagtgagaatggcaattattataattcaaccattgtgaaaagcagtgtagtgattcctcactaaactaaaaataaaattaccatttgacccagtaacctcacaacggggtttatacctaaaaatatataaattattctatcataaagacacatgcacaatcacattcgttgcagtactattcacaatagcaaagacatggaatcaacctaaatgcctatcaatggtagactggatacagaaaatacggtatggttgggcatgatggcacatgtctgtaatccagcactttgggggctgagccaggtggattgcctgagctcaggagtttgagaccggcatggacaacatggcaaaatcccatctattaaaaagaaaaattagctaggcatggtggcacaagccttcagtcttagctacttgagaagcttagatagaagaggattgtttgagcctgagtgggtgagtttcagcgagccaagatcacaccactgcactgcagcctgggaaagaaagtgagaccctgtctccaaaaataacaaaaaataaaaaacctaataaaaacaaaatatgggccgggtgcagtggctcacacctgtaatcccagcactttgggaggccaaggcggcagatcacctgaagtcaggagttcaagaccagcctggccaacatggcaaaaccccatctatactaaaaatacaaaaattagctgagtgtggtggcacacgcctgtaatcccagctacttgggaggctgtggcagaactgcttgaacccgggaggtggaggttgcagtgaactgagatcatgccactgcactccagcctgtgtgatacagtgagattccatatcaaaacaaacaaacaaacaaatatggtacataaacatcatgacatcatgaaatactgtgtggccattaaaaaaaaaaaaaagagtatgtcctttgcagcaacatggatgaagctggagatcactattcttagaaaactgatacagaaacagaaaaccaaatgcatgttattatttataagtaagagataaataagaacacatgaacacagaggggaaaaaagacactgaggcctagttgagggtgggaggactaaaagggtcagaaaaagtacatttttggtgctatgattagtactgcagtgacaaaataatctccacaccaaactcccatgacacaattttagctgtataacaaagctgcacatgtacccctgaaccacccaaaaataaaagttaaaagaaaaaaatccctcgattggagagagtgcaatgcaggtggaaggactggtttgtgctatagatagtggcccaggtggggctgtactctgattcatttctgggtccatgcagccagataagattatgaatcctaggctggtggagaaaacaggatgctactgcagattccgtgtctgaaaatagggatatgccaggagacttgtagacacttttgtaggtttttggccaaaaaaaccactaggatcaaaaatgctgtggtaaaattcctgagggtggtgccttgtccagagaggggtgtggacacatcaatgtctagtgggtgtttgtgagtgggtggaaatcctctgctggcagctgtggcaaaagggggtttgtcatcagatctcctttaagttttcagtcttctgtcaccctgggaggagacctggaatcaaagaacaaggggcagtgtgacagcctgtgtagaggagagcagagcttcccattcccagacacccggagtttcattctaggccaggagtctgtgatatctttcttctggcaccaaatctgcagagtttgatgaacaccaacaattctccaacagcaactcattgtctaacacttgaattctgacaccacccagagtcagcacagaccctgattcagggctcagtcccacaacattgtcctcactgcagatgccagtcacaaaccccatgggctcatctatgcttctgacctactgtttaaaaagtggggactcccataacctttttgaaattcagtaatctgatacagctactcacagaactcagcagaacactgtagttatattcactggattcaaataaaatatacaacccccaaaaagtcaaatggaagaaaagtatagaaccaagaaaaaaggtgggaaaagatgaagcatatagataacaaacagctaggattaataaaattctctatcctctgtgttctccaggaacacttatgaaaagaaacacccttcccattgtgacttagatggtgctctcttttcttacctactacacagccaggaaaacactctgcatattttcttttctcgttaaaaaaatcagctgtatttgtcttcagtggtcaacataaaatacttcttaatcaaacttcacttattttcttcccacaggctcctgaactctgagctactctcagtccgagccaccatacaacctcattttatgctactgcagattcagtgtctgaagaacactcctaagaacacactgacttcagggtaaaacattctctgatctaaaatctgattatttcacccttcatttaaatattcccctcaccttctttctaatcttatttgttttctctaggaaaaaaaggccttttctacctaatctttataatccttaaagatcttatagttggtacttcctcctgttgcaatactcctttggaattctttttttttttttaatgtacatctagctggttattttaaaacctctcaaaactgcctcaaaacagtaacaattttatcttcaataagacactcccaaaccccttctatcttaaccttaactgcatctgcctgtggggccccagctttccagggctctgtagcttctctcactatagaggcttcttccatggctgcggtaagcaggctgggacatctgcaggaaaggctttccagaaggaactaaatgggcctttaataacctccgtttgctagctcaaaattaaccttagcttgcagtcattgggctcaagctttaattacatgtcagagtcattcacttagtttttgaaactaagtgtttgaaaaatccagcaaaatgattcaaaaacagtgttcatataagaaaattttaaggtgcttaccttttgtacctcagtaagagaagcaaatgtatttatttcttttggacaataaagcattattttattttttgtattaaaaatcatgaggtaaacagttatatgggaacacttctaggaggtacctagtttcatcacataaaatttaccattaaactcagaaatcaaaataacaggatatagaacaaagatacttacttttgcaaatttaccctgcaaaaaaagaaactgatgttttcacgaatctatgtaactcaccaattatctaccacattttcttgtggaaatatattaattctctatagccaaaacggaagaaaaaatgttcttatttttttcccaaacattccaaaagctagatggaattgtttgaaatcactcagctataaaaagcacacctgagggcagggcgcagtggctcacacctgtaatctcagcactttgggaggccgaggcaggtggatcatgaggtcaggaaatcaagaccatcctggctaacatggtgaaacaccgtctctattaaaaatacaaaaaaattagctgggtgtggtggcgggtgcctgtagtcccagctacttgggaggctgaagcaggagaatggtgtgaacctgggaggcgaagcttgcagcgagccgagatcccaccactgcactccagcctgggtgacagagcgagattctgtctcaaaaaaaaaaaaaaagaaaagaaaagaaaagaaaaccacacctgagaaaactcctaaattcactctgagaaagaaaaaggtgaatgagaattttcaacaaatgaaatatataattagatattattttttgatactcacctttttatgccctttgtaaatattttcttacctttcaagccctactaataagatgcaatttacagttaaaaaactgaggtcagccgggcacagtggctcacacctgcaatcccagcactttgggaggccaaggcaggcagattacttgaggtcagaattttgagctcaaacagcctggccaacatggtgaacccccatctctactaaaaatacaaaaagtagccaggtgtggtggtgggcacctgtagtcccagctgcttgggaggctgaggcatgagaatcacttgaacttgggatgcagaggttgcagtgagccgagattgcaccaccgcactccagcctgggcgacagaggaaaacactgtctaaaacaaaaaagtccgtgtgcggtggctcacgtctgtaatcccagcactttgggaggccaaggtgggtggatcacgaggtcaagagttcgagaccagcctgggcaatatggtgaaattccatctctaccaaaaatacaaaaattagccaggcatgtgggtgcacgcctgtagtcccagctacttgggaggctgcggcagaagaattgctttaatccgggaggcggaggttacagtgagcagagatcatgccactgcactccagcctgggcgacagagggagactccatctcaaaaaaaaagaagaagaaaaaaaactaaggtcaaaataagtgaacaaatcatttaatcgtttcaaggtagagatatgtctgattcatgtgtcaagtcaggtcatccaattactgagagattcagccaccccatcctgttcacttaagtgctcaataatcattctctcaggagactctgaactatgccccagtgagtgccccaggtacattttactttgcaagttcttgcaccatctcactggggtcagtttctttttctttgtctttggagtgctatttttttccacaaactttttaccatttttctttcactatttttctgtcccctaggagaatccagaggcaaaaattattttggtttccccttcaataccggcatctgattgtctgaacagcaatgtgtctccaagaaatggaagctgggttgggtaaagacaatactaatacctcaaggggttagctttccaaaaaaacagggcaccagtagatgcctctcagccccagggcattcacctgctctcctgaaaggctacattccatacctcgggttgtcctacaggagatgagaggctacactccatacctcaggttgtcttatgaaagataagaggctacactccatacctcaggttgtcttatgggagatgagaggctacactccatacctctggttgtcttatgggagatgagaggctacactccatacctctggttgtcttatgggagatgagaggctacactccatatctctggttgtcttatgggagaaaatgacccaggagctgatattcactagatactcttgcagacacagccatggccagtatcttggtttttccccagacagtactgaatctcaggtccaaggaaaaaactgaagggtggctgaggacacgtctccctataacttttccaaagggaaaccctgacccaaaaaacattctgataagatatctgtgtctagggaaactagaagaaaaaaacatttacaaacagaaaacaaatctttttaaatgtgccatcaaatgctttgtcaaaaaatgattacaataggtatcaaaatgtacactaaaggacaaatagttgatcatgtgaataagggaggggaaactggcatttgggaatgtcagaaggaactggaaattaagtattttactgcaagtcagagtcaggctggagaaatagggggtggcagatagacttgaggccctgcttgggacacatgtgaaaaatgcaaggaaacagcagttccctgtggggtgtgaaaataattaagtggctggcagttagactgaggaggctttatttcctaatttctacttttaaaaaatctaattcggccaggcgtggcggcttacacctgtaatcccagcactttgggaggccgaggcgggtggatcacttgaaatcaggagttcgagaccagcctgaccaacacggtgaaaccccgtccctattaaaaatacaagtggcacatgcctgtaatcccagctacttgggaggctgaggcaggagaatcgcttgaacctgggaggcggagagtccagttagcctagatggcgccattgcactccagcctgggcgacaaagtgagacttggtctcaaaaaaaaaaaaaaaaaaaatctaattcaaatgtattttttttaaattactacattgggggaaaaaaattcaggcttaacacactataaactgccaattaacctctgattacataaccaagaaatttccatcttcatgttacaaattaagaaaccatgaggctgggcgccatgactcacacctataatcccagcactttgggaggctgaggcgggtggatcatgaggtcaggagatcgagactaccctgactaacacggtgaaactccgtctctactaaaaaataccaaaaaattagccgggggtgttggcgggcacctgcagtcgcagctactcgggaggctgaggcaggagaatggcgtgaacccgggaggcggagcttccagtgagccaagattccgctactgcactccagcctgggcgacagagcgagactccatctcaaaaaaaaaaaaaaaaaaaacaacaaaaaaccaggaaactacataactgtacctaaccaattattgaatgtggttttcttcattatgcaccttataaaactctttccatcaaaccccttcaatagaccataaactacaatccatagttgggtgctctacaattttggaatcactcttaaattatttaatattttttcggcgacttccataaatttttaatgggagaatacaggaactgggagcctcacggaccaaagctcttcccattcatgaacccacacctcaagtcaggattctcctctgactaccctcccacagtccgtgcacaatctgggagagactccgcgctgagggtgcagagctgccccaagagggctccaggccagggcacaatcacagcgcagggaagagacaggacgcccggcggcccgcgcagccgccatcttatggctgaaggggactgaggtcgagctaggcaaggagaacttgtggagctgactgcgggtaggcttgagtcccgccacagccacttcccgccggttccaaccagcccaggccactctctcagtgtgtcggacccggcacactcaccatttctaggcttccagggggtcctggcgacttagttgtggatctcccaatacctgcaggtcatagggccacagaggctgggactctaggaacagtaaggacaaggcctttacctccggctgcagcgagagacaaaggaccgaccacatcccggaagccgacctgtccccccccccagctgcctgcctgattggacattcccagcccagcatccctgattggataatgtttaaggccccgccctttcaggccctgagtgacagaagatgtgatcagatgctgggctgaatgaagaaagagagccaacgtaggctgcagccttttcaggcagggcttcctccctgagctgagccaggcctaccccagagcatgggaaaattctatctcttctttattctctctttttaaatgtatttgaaatgtgaacaaatatattttactgtcatgttaataatacataaaacttttgtacaagagtaaatcaatttttactttagtaatagtgtattatcaatactaaaggctgggtgcagtggcttacgcctttaatcccatcagtttgggaggccgaggcgggtggatcaccggaggtcagaagttcaagatcagcctggttgacatggtgaaaccccttctctactaaaaatacgaacattagtcaggtgtggtggtgggcgcctgtaatcccagctattcaggaggctgaggcaggagaatcatttgaacccgggaggtggagattgcagtgagccaggatcaagccattgcactgcggcctgggcaacaagagtgaaacgccagctcaaaaacatgggcaacaagagtgaaacgccatctcaaaaaacaaaacaacaaaaaagctaaacctaatgttagtaaaaccttataaataaatccatgaaatttgtcatttttgaacactctagatgttcatatatattttacaatctcatatttaactttttctattttattttaatagcctttttttttaacttgaaacaaccttaagctgttttttgagacgagtcttgccaggctagagtgcaatggcatgatctcagctcactgcaacctccctctctgggttcaagcgattctcctgcctcagcctcccgagtagctgggattacaggcgcccaccaccacacccagctaatttagcatggtagcctcaccctgtagtaccagctattcgggggctaaagtaggaggattgcctgagcccaggaggttgtggctgcagtgagccctgatcaagccactgcactccattctgggtgacaagagtgagactctttctaaaaaaaaaaaaaaagccaaaacatataaacttaaacttatgggagtttggaggtttttatttttgtcttaaattattatatttcaatagttttggggtacatgtagtatttggttacatggataagttcctaaatcttttctgagatttaggtgcaccaatctcccaagcagtgtgcactctacccaatgtgtagtctttcatccctcaccccctctcctacccttcccactgagtgcccagagtccactatataattcttttttttaattatatttatttattgagacagagtttcgctcttattgcccaggccggagtacagtggcgcgatctcagctcaccgcaacctctgcctcccaggttcaagcgatgctcctgcctcagccttcccgagtatctgggattataggcatgtgccaccatgcctggctaattttgtagttttagtagagacagggtttctccatgttggtcaggcttgtctcgaactcccaacctcaggtgatcgcccacctcagcctcccaaagtgctgggattacaggcgtgagccaccgtgcccatccccattacataattgttatgcctttgcatcttcatagcttagctcccgtttataagtgaggaaatacaatatttgggtttgtatcccctagttcttttttccttttttttttttgagatggagtttgctgtgattacaggcataagccaccgtgcctggcctattttttgatgttttaattatggtcttttctgtttgtttgtttgtttgtttgtttgtttgtttttgacatggagtctgtcacacagactggactgcagtggtgcgatcttggcttactgcaacctccacctcccgggttcaagcgattctccagcctcagcctctggagtagcagggattacggacacactccatcgcgccctgctaatttttgtatttttagtagaggtgaggttttaccatgttggccaggctagtctggaactcctgacctcaggtgatccacccgtcttggtctcccagagtgctgggattacaggcatgagccaccatgcccggccaatgatggtcattcttgcaagagtaaggtgatatcacattgtggttttgatttgtatttccctaatcattaatcattagtgatgttcagcatttttttttaatgtttgttggccatttgtatatcttcttttgagaattgtttaagtcccatctgtctttgtttttgttgcatttgctttgaggttcttggtcatgcactctttgcctaagtcaatgcctaggagagttttttcaatgctttagaattcgggtagtttcaggtcttagattaaagtatttgatccatcttgagttgatttttgtataaggtgagagatgaagatactttttttttatttttatttttttgagacggagtctcgctctgttcccaggctggagtacagtgtcatgatctcggctcactacaacctctgcctcccgggttcaagcaattctctgcctcagcctcccaagtagctgggattacaggcacctgccaccacacccagctaaatttttttttttttttttgtatttttagtagagacggggtttcaccatcttggccaggctggttttgaactcctgacctcgtgatccacccaccttgacctcccaaagtgctgggattacaggtataagccactgcactcagccgaagatccagttttattcttcaatatgtggcttcccaattatcccagtaccattctattcaatagaatagggtgttatttccccacttcatatctttgtttactttgtcaaagatcagttgactgtaagtatttgggtttatttctggtttcactattctgtttcattggtcttcatatctatttttatacccatacaatgctgttttggtaactataaccttgtagtatagtttgaagtcagataacgtgatgtcttcagatttttttgtgtgtttttgattttgttgttttgttttgttttgttttgttttcctagtcttgctttgactatggaggctctctttttattttatataaattttaggattttttttttttagttttaggatttttttttttttggtatcctgaaattttactgcatttatgtatcagatcgaaaagttttttgttttgtttttttttctttttgagacaaggtcttactctgtcacccaggctggagtgcagtggcatgatcttggctcactgcaccctctgcatcccaggttcaagtgattctcctgtctcagcctcccttgtagctgggattacagccacttgccactgcaaccggctaatttttgtattcttagtagagatggggttttaccatgttggccaggctggtcttgaactcctgacctcaagtgatccacctgcctccatgtcccaaagtgctgggattacaggcttgagccactgcatccagccctaaaagcttttttagttgagttttagggtttcccaggtacacaattatatcattggtaaacagtgacaatttgacttcctctttaccaatttagattctgtttattttttgctttactctgattgctttggctaagacatccattactgtgttgaatagaagtggtgagagtgggcattattgtcttgttccagttctcagaaaaaatcctttcaactttttcctgttcagtgtaatgttggctgtttatcacagatagattttttttttttctcggacggagtctcgctctgtcacccaggctggagtgcaatgtcaggatctctgctcactgcaatctccacctcccagactcaagcgattctcccgcctcagcctccccagtagctggcaccacaggcacccaccatcatgcctggctaatttttgtatttttgaacagacgaggtttcaccatgttggccaagctgatctcaaactcctgacctcaagtgatctgcccacctcagcctcccaaagtgctgggattacaggcatgagccaccacgcccagcctgtcatagatggtttttatgaccttacaatatgttccctctatcccgattttgctgaggattttaatcataaagtgatgctggattttgccaaatgatttttctgcatatattgagataatcatataatttttggttttaattctgtttatttggtgtataacatgtattgacttacctatgttaaatcatctctgcatccctggcataaaatgttcttgattatggtgtactatcttattaatatgttgctgtgtttggttagctagtattttatggaagatttttgcatttatgctcatcaggaacattggtgtgtagttttcttttattatgtcttttcatgatcttggtattagagtgatactggcttcatagaataatttaggaaggattccctttttctctatcttttggaatagtttcagtaggactggtaccaattctttgaattttggatagaattgagctatgaatccatcttgtcctggacgttttttgttggcagtttttttttttttttttcttgagtcttgcgctgtcacccaggctggagtgcagtggtgcgatgttgactcactgcaaacttgcctcctgggtttaagtgattctcctgcctaagcctcccaagtagctgggattacaggcacaaaccaccatacctggctaatttttgtatttttagtagagatggggttttgccatgttgatcagactggtctcaaacacctgacctcaagtgatccccccacctcgtcctaccaaagtgctaggattacaggcatgagccactgaacccagctggcaatgttttattactagtttaatcttgctacttgttattggtgtgttcagagtttttatttcttcctgatttaatctaggagggttgtatatttccaggaatttatcaaactcctctaggttttcaagtttgagcatgtaaaggtattcgtagcagctttgaatgatcttttatttctaattgagcatatttggatcttctttctgcttttctgggttaatcttactaatagtctatcagttggatttatcttttcaaataactagcttattgttttatcttttatattttttaaaatttcaaatttatttagttcttctctgatctttgttattatttttttttcctgctgggtttgggtttggtttgttcttgtttctcttgttccttgaggctaaacaatctcaggttgtttattgtggttttttgaactttttgatgtatgtatttaatgctatgaactttcctcttagcactgcttttgctgtatcccagatgttttaatatgttgtgtcactattattcaatttaaataattatttaatttccatcttgatttcattgtggaaccaattattcatgagcagtttatttaattttcatgtatttgtatggttttgagtgttcctatttgaattgatttctaattttattccactgtggcctaagacagtacttgatataattttaatattcttaaatttattcaggggctgggcatggtggctcatgctttaatcccagcactttgggatgccaaggcaggtggataacctgaggtcaggagttcaaaaccagcctggtcaacatggtgaaaccccatcgctactaaaaatacaaaaattaggcaggcatggtggcacgtggctgtaatcccagctactcagaaggctgaggtaggagaatcccttgaacttgggaggcagaggttgctgtgagctgagattgcaccattgcactccagccttggtgacagagcaagactgtcacaaaaaaaaaaaacatcagacttgtcttttggcctattatatggtctatcttgaagaatgttttatgtgctgatgaaaagaatgtatattctgcagttgttgggtagaatattctgtaaatctctgttaagtccatttgttctaaggtgtagtttaagaccattgttttttgtttgtttgtttgtttgttcatttgactttctgtcttgatgatatgtctaatgctgtaagtaaagtaaaaaagtcccccaatatttttatgttgttgtctctctcattgcatttcttaagggacaacttaggtgaaacaagaaaatttatacttctgaagcacagaactaacattttaggctaaaatatattttttttttctttgagatggagtctcactctgtcgcccaagctggagtgcagtggtgtgatcttggctcacttgcaacctccacctcctggctcaagtgattctcctgcctcagactcccgagtagctgggactgcaggcacctgccaccacgcatggctaatttttgtgttttttagtagaaacaaggtttcaccatattggccaggctggtttcaaactcctgacctcaggtgatctgcctgcctcggcctcccagagtgctgggattacaggtgtgagccactgtgcctggccttaaatgtactgtttatgttttttttaatatataagattaaatgatttgcaaacagcaactttttatttatttgtcttcaatttcaatggctttaaacaatttttttgcctagttcttctgccatgtacttccaggtttatgttaaagtagaagcattgacaatggggacaatatagttttgcattgcattggtttttgtaaatttcgtggagcaaaagcctgttcaagtttatataaactggttacaaggggtaaaaatcttcttctgttgggcccccatatttataggatgccctctttatttgtaatagagagaggtggtaaacgcagcaaagcagctgcgtctgcataggatttacctttagttggcttgttacaaaaggcttgggtagttgtaattcccattttattattgaacagattgaatatccttcaggactttcatctgtagagcagacactaggggaagttgttgcagtcagatctgcatatggtggggcttacatcaggatgtggatgaggatgcctttcaccaagtactagagagggtcttcccaggtcactgtgtgggattctacctaggcagaattggccataaactgtggattggagttagaactaaaacattaaactgtatggctacaaatgggtgtcttcctccaggcctctggaagggcagaagctctcccaggctgtggctgggaggagtttggaatggttataggataagttcagaattctcagtgggagcaagttgagttggctattttttgggttgtggccaagaacagaaatcctgtagtttgccaccttagtggaagcctgtctcctgaaaagaatgttcctcaatcttgggctttagcagagtttcacaactccgtccctggatctcaaagctcttttgaaggtacttgttttagagatgaagtctttctacataacacaggctggtcttgaaatcttggcctgaagaaattcttcaacctgaatgttttatgtagctatcattacagatatgagccaggatgcctggatctctcataaacacatttttgtcagggctggctcacagttttcttgctgtcgggggataagaaaataggtcaccttttttttttttttaaattttactgatgtcgctctccctatacatttttactttgtatttcctatttcaaatttctctgttattttagattcagacatttaggataatatgttagaatttacatgttatgcctgaaataaattagattattagtaggcattccttatttactaaaatatttagttataaatttaagtttgctgcaggcagaaaggaattatatgatttccattcactttcttcagcctatatttaaataataaaataagttcttccctgataattgttttatatatcagaggctttaattatattctgcagactttttttttaatttaacaaagtaagactattctttgcttctaaagttaaattacagcagtttcattttgtgtaagaatagcacatattctttaagaatatatgtagcatatattgtgtaagaacagcatatataacgatgaaatttacctctagttttctttagtgcttatttattaaaagcttatcattagaatcttctatttatgattatactgcaatttctcttaagttttactgccatgcagtgcatgccgatgactcaaaatacctgccttccatgagtacacagacacagtcaaatattgtagttatctagacaaatttttgtaatggtacatcaatgttgcatactagatctgatgagtaaacatttctgttattattattttgcagttctatatgtgtgctttttagcgtcagtttcttaatatcagtgaattttttttgttttacgtattataattctagacaatttgcaattctgtttgtacactttaagtcaatgtggggtttaattgagaaataaattagccatatgtctatcacaatcagattatatatttgtgtgtttttatctataaatatgactccaattatggttatggcttatcttgtatatattctttcttagctgattttcagtggttgttttatcttgtctaagtgagtagttgtggaaataatcttatttttgccttgtgtttaataatgaatatatattttctttgtgtgagagaaacacttttgtgatttgaaggtaattctagaaaagatttataattcttcatttagtttttcttctaaaataatttttgtaaaaacagataacataaaattgattctctaaaatctatttaagtgtacattttatggccaggcatggtagtggctcacctctgtgatcccagaaattcgagaggtcaaaacagaaggatcacctgagcccaaatgtttgagatcagcctgggaaacatataaagacctgctgtatccaaaaaaattttaaaataacaagccatggtggtgtgcacctgtggttccagcaacctgggagatcaagggaaaaggagtactttatcctgggagtttgaggctgaagtgagccataattttgccactacacaccagtttgggtgacaaagtgagaccctctgtcaaaaaaaaaagctgtggatttcaggcatgttaaagtatattcacctggttatgcaaaaggcttctagaggttttacatcttgtaaaactaatactcaatacccactaagtaacaactgcccattttaccctctctccagcccttggcaaatatctttcagctttctgtttttatgagtttggctatttaacttatctcaggtaaatgaagtaatgtagtattcatcattttgttactggtttatttcatgtgacatagtattttcaaagtttatcttaaaatgtgacaaaattttctcttttaaggctgaatgatattccatgtatgtgtatgttaaattttttgatgtatttataaatcaagggacatatagattacttcagccttttggcttttgtgaaatctggtacaataagcataaatgtttacatgtctcctccaggttctgtgttgcatactttggaaatcaatttataaataagattgttgtaattgattacaattttatttttaattatctgaggaacatttataacattttaaaataatggctgcatctttgttttccaccaacaatcagcataggtttcattttcatagcatcaccaatagatctggttttcttaaaaaattgatagtggccgttccaatgggtgtcaggttattttgtatttcactgtgatatttatgcattcctctacaaattagtaattttgtgagtcctgtcaaatgctcttcccatttatgcttttgataaaaatttagtttaattagttttccatttctaaatcctgttattcaactttattgttcagttttaagagttgcttatatattctgaatattaacttctatcacatgtgatttgcaaatattttcattgatttcctaagtggcattgtcactctcttgaagttttttttgatgtgcaaaaattttgaagtatatttcagttaaatttttctgttcttttcattgttgcttatgcgtttaatgtcatctaagaaaatgattccaaggccaatgtcatgtcttttctccatgtttttttaagacacttattagctattttttatatctaagtattttatataaatttttttgtctatggttcaaggaaagaatccagctttatcagtatagatattcagttttcagcattaatttttgaagatattatcttttctctattgtgtgctcatggcagctttgtggaagatcattatttacagaagggttcatttctgggctctctattctgatttatcatctgtttatctgtctttgtgtcagtactatattgttttcattatagcttttaatatgttttgaaatgggaaagtttattacctcctctatttcatgggtgtttggctagttatagttaataatcaaattttaaaatgttaaataatatttctgtttaaaaatcctgtgctattaggaattttatagaaattacgtcaaatttgtttaccactgtaggttgtactgacatcttaaaaaattaaattttttgactcttgagcaagaatatgttaaagagtgttttatttttattttatttatttatttattttatttagagagagaagggatcttgctttttttttttcctttgagacagagtctcactctgtcatccaggcaggagtgcagtggcacaatctcaattcaacacaacctccaccttctgggttcaagtgattctcctgcctcagcctcctgaatagttgggattacaggcactcaccaccatgcctggctcatttttttgtatttttagtagagacgaggtttcaccatgttggtctggctggtctcaaactcttgatgtcaggcaatccacctgcctcggcctcccaaagttctcgggttacagaggtgagccactgcacccagctcatgtgtttaatttttatatacttttggattttcctgttttacttttaccttaggttcaaataatagcatcagcaaatctgtcctgccaaatgaaaagaggaaaacctttcaaaataaccaaattttgaaagagcatactggcactgcatatgccctataaagaatgctgaaaagcatcccacttattctaaaattgaccacataattggaagtaaaacactcatcagcaaatgcaaaagaatggaaatcataacaaacagtctctcataccacagtgcaatcaaattaaaactctggataagtaactcactcaaaaccactcaactacatggaaacagaacaacatgctccagaatgactactggggaaataatgaaatgaaggcagaaataagtaagttctttgaaaccaataagaatgatgacacaatgtaccagaatctctgggtcacagacaaagcagtgcttagagggaaacttatagcactaaatgctcacaagagaaagcaggaaaggtctaaaatcaacatcctaaaatcacaattaacagaactagagaagcaagagcaaacaaattcaaatgctggcagaagacaagaaataactaagattagagcagaactgaaggagatagagacacaaaacacccttcaaaaaattaatgattccaggagctggttttttgaaaagatctacaaaatagatagactgctagccagactaataaagaagaaaagagagaggaatcaaatagatgcaataaaaaataatcaagagggtattggcactgatcccacagaaatacaaactaccatcagataatactgtaaacacctcaatgtaaaaaactagataatctagaagaaatggataaattcctggacacataccctctgaagactaaaccaggaagaagtcaaatccctgaatagaccaataacaagttttgaaattgaggcagtaattaatagcctaccaaccaaaaaatacctgggaccagacagattcacagccatattctaccacaggtacaaagaggagctggtaccaattcttctgaaattattccaaacaatagagaaagagggactcctccctagctcattttgggccagcatcatcctgataccaaagctggcagagacacaacaaaaaaagaaaacttcaggccaatatccctgatgaacattgatgtgaaaatcctcaataaaatactggcaaactgaatccagcagcacatcaaaaagcttatccaccatgatccagtcagcttcatccctgggatgcatggctggttcaacatacacaaatcaataaacgtaatccatcacataaacagaacccatgacaaaaaccacgtgattatctcaatagatgcagaaaaggccttcaacaaaattcaacaccccattcatgctaaaaactctcaataaactaagtattgatggaacatatctcaaaataataaaagctatttatgacagaccacagttaatgtcatactgaatgggcaaaacctggaagcattccctttgaaaactggcacaagacaaggatgccctctctcaccattcctattcaacatagtattggaagttctggccaggacaatcaggcaagagaaagaaataatgagtattcaaataggaaaagaggaagtcaaattgtctctgtttgcagatgacatgattgtatgttgagaaaactccatcatctccgccccaaatctccttaagctgataagcaacttcagcaaagtctcaggatacaaaatcaatgtgcaaaaatcacaagcattcctatacaccaataacagaccaacagagagccaaatcatgactgagctcccattcacaattgctacaaagagaataaaataactaggaatacaacttccaagggatgtgaaggaccttttcaaggagagctacaaaccacagctcaatgaaatagaagaggacacaaacaaatggaagaacattccatgctcatgataggaagaatcaatatcatgaaaatggccatactgcctaaggtaatttatagacccaatgccatccccatgaagctaccaatgacttcacagcattggaaaaaactactttaaatttcatatggaaccaaaaaagagtccacattgccaagacaatcctaaacaaaaagaacaaagctggagacattacagtacctgacttcaaactattgtaaaaggctacagtaaccaaaacagcatggtattggtatcaaaacagatatatagaccaatggaacagaacagaggcctcagaaataacaccacacatctacaaccatctgatctttgacaaacctgacaaaaaacaagaaatggggaaaggattcccaatttaataaatggtgttgggaaaactggctagccatatgcagaaaactgaaactggaccccttccttacaccatatacaaaaattaactcaagatggattaaagacttaaatgtaacaccccaaaccataaaaaccctagaagaaaacctaggcaatgctattcaggacataggcatgggcaaagacttcatgactaaaacagcaaaagcaatggcaacaaaagccaaaattgacaaatgggacctaattaaactcaagagcttctgcacagcaaaagaaactatcatcagagtgaacaggcaacctatggaatgggagaaaaattttgcaatctatccatctgacaaagggctaatatccaggctctacaaagaacttaaacaaatttacaagagaaaagcaaccccatcaaaaagtgggcaaaggataagaacagacacttctcaaaagaagacatttatgcagccaacaaacatatgaaaaaaagctcactgtcactagtcatgagagaaatgtaaatcaaaatcacaatgagataccatctcacaacagttagaatgtaatcattaaaaagtcagaaaacaacatatgctggggaggatgaggagaaataggaacactttcacactgttggggggagtgtaaatcagttcaaccattgtggaagacaatgtgacaattcctcaaggatctagaatcagaaataccatttgacccagcaatcccattactgggtatatacccgaaagattataaatcattctactataaagacacatgcacacgtatgtttgttgcagcactattcacaatagcaaagacttggaaccaacccaagtgcccatcagtgatagactggataaagaaaatgtggcacatatacaccacggaatactatgcagccataaacaaggatgagttcatgttctttgcagggacatggatgaagctggaaaccataattctcagcaaactaacacaagaacagaaaaccaaacactgcatgttctcactcataagtgggagttgaacaatgagaatgcatggacacaaggaggggaacatcacacactgggacctgtcagcgggtggggggctaggagatgaatagtattagaagaaatacctaatgtagatgatgggttgatgggttcagcaaaccatcatggcacgtgtatacctgtgtaacaaacctgcacattctgcacatgtatctcagaacttaaagtgtaataataaaaaaggaaaaaaaagaatgctgaagagtttcttttattgaaaataaaatgactcaagaaaatgacacataatcatatctatatatgaatgcatatatatgtgtatatatatgtatgtatattatatatatgtatgtgtacatatatatgtatttgtatatatatatatttttttgagccgagttttactcttgtttcccaggctggagtgcagtggcctgatctctgctcactgccacctctgccttccagtttcatgtgattctcctgcctcagcttcccaaatagctgagatcacaggtgtccgccaccacacccggctaattttttgtatttttaggagagatggcgtttcaccatgttggccaggctggtctcgaactcctaacctcctgatctgcccacctcagattccaaaagtgctgggattacaggcatgagccactgtgcctggccaaaaaaaaaaggggggattattttcttggatagatattcacatacaaaaaaatgaaatttcttagcataatcataatggtgcagaaaacatttttaagtattttctataatttgaaaaaaatttagaaaacaatgaaaattttgagagtaaaatctttgtatgcaactgaagttcatcttctaccaggttaaaatgtagttatatcttttagaagttttatgtaatttccaaagtaccacaaggtatcacaaaaaaaaatctgtatagatatgcaaaacaaaataaggaaaaagtaaaagcatatcagtacaaaaatcaaaacgacacaaaggaagacacagagagaaaattagagacaaagatacaacaatcaaatgaaacaataaaataacattattaagtctttctgtttcagaaagttatttaaacatgtatataaaatgaacttaattcagagacatacatttaataaaggaattagataattttaaaaaccaagatgcaacttgcctttctataatagagtcatcagagatctaatgataaaaaagactgatagtggcaagatggatgtagatattctatgcaaatattaattaaattagagcagaagaggtcaaaataatgttactttagctgtatctttatttatttatttattttgagatggagtcttgctctgtttccaggctggagtgcagtggtgtgatcttggctcactgcaacctctgcctcctgggtccaagtgattctcctgcctcagcctcccaagtagctgggactacaggcgcgtgccaccatggccagctaatttttgtattttcagttgagacgggttttcaccatgttggccatatagtctcgatctcttgaccttgtgatccacccgcctcagcctcccaaagtgctgggattacaagcgtgagccaccgcgcctggccttgagctctatcttaagtcaaaaaccgtcatattttataaaatgtttttttaagtcaaaactctacagagacaaaacaagccattacaaaataatagatttatttactgggaacctataacaaatttgtatatctgtgtgtgtgtgtgttttgtgcaagtgtgtgtatgtgtatctcacattaggcttgcaaaatatataaatcaaatattgacagaattgaagaaacacatagagaacaatatagttacaatagcatatttcttttcttttcttttcttttttttttagacggagtctcgctctgtctccaggctggagtgcagtggtgtgatcttggctcactgcaacttccacctcccaggttcaagtgattctcctgcctcagcctcccgagtagctgggagaacaggcgtgcactaccacccccagctaatttttgtatttttagtagagacagggtttcaccatgttggccaggatggtcttgatctcttgaccttgtgatctgcctgccttgtccttccagagtgctgggaatacaggcatgagccaccacatccagcctacagtagcatatttcaataccccattttgtataataaaaataaaaccagacagaataatagtaagagaacagagaacttgaagacaagtataaaacaatcattcctaacagaggtatagagaacactcctcaacaatatcaggatacacagccttcccaacagctcataaaacattctgcttgatagaccacctgttaggccaaaatagaagtcttaacataatttttaaaactaaatttatatggattactttctatcaccaaaatgaagtgacagtatgaaacaataatagaaaaaaaaacctgaaaaaagtataaatatatagaaattaacacactatgagcatgctcctgttcaaaggttgagataaatattttgaagatatccatactgttcaatgtaaactacagatttaatgcaatgttctttaaaagttcacactacattttgaagaaatagacacagcaactctaaaagtatatggaatctaatgagacaataaaatacccaataatcttcaaaaaaagaaataatgttaaaggcattacagttcctgattttaaaactcattacaaatctacaaaattaaaacaatttggtgtgagtataaaagtaaaaatgtagactaataaaaatcaatgcagcacatatataaaatttaacatatatattcatatgaagaattatttacatgctcataataattgcagcattgttacaaatttttagtagaggccgggtttcgccatgttgcccacgctggtctcctaggctcaagtgatccacccatcgctgccttccaaaccgctgggattacaggtgtgagccatctcacccggcccaatttattttcttttttaaggttttttttctgaaaattttataatattttggatgggaatgtattgccctgttttgtatacattgtaatctttgattgatatttggacattttttaaaaagctacctgtcacaatctttatcacgtagctttgtcctggcatagtctgaaaacaattgtctttgctagagattctgggagtctttcaaacatgttcttaggatgtgtcttgtctgaaatttgttgtttattttttagttaaagaagtttattaatctttcttcttaatagtcttcacttgctacacctgttccctgtctgtggtactgcagtctctctgctgctgtaacatttacctctggtctcagcagacccaaattgtcactccaaagtataccaccatttcattcagcactttgtcactttgtgacctctgtctctgccaccatgaccattttgttcatggacctattgggcaatgacaggggtagctggggaaagatgctgagtgatgtcaacaaaacaggtcatcctatccacttgattatcaaaatcctcctctgctgaggtcacccattggttagcactcacatgggatacaaatatcttcacagtttttgaccactcaggaggtccatccacatacctcttccccaaatttctttgtcaccaatttttcaatggtgcttcttccaagtccctggcaatccagtcaaaccattggctaaagcccatgattcagtatgtaatcacacatctggccattcctccttccatgcaaagtgcacaaccaggtgcactgctcaaaattctgcccactgggaagacttcccttcaccactgtctttcagggatgtcctagaaaggaactgtagcgccacagctgggtccactttcaggtggtgccttcatattatacagaaccgtctgtaaatgaggccatagtcttttcttcctctgtcaaatgatcatagggaactccccattaggtcatcagtgcaggctgggggagagaaggcagggtggcagaaatggagaccatgggcatttgagccacttcctcatgtaacttacttgtgccttcagaacctgctcaagcccgatcacatatataccacatccatttgatgatggaatgctgttgtgcatgacccactttgtggttagatgggtcagaaagcacccagttcatgataggcagttcaggtcgcatagtgacttgataaaacatagtcaaacgttcagtttttaccaaagcccagtaacaggccaagagttgtctctcaaaaggagagtagttatctgcagaaaatggcagggctttgctccaaaatcctagaggctgccaggtgcagtggctcatgcctgtaatcccagcactttgggaagccgaggcaaacagatcacctgaggtcaggagtttgagaccagcctggccaacatggtgaaaccccaagtctactaaatatacaaaaattagccagacgtagtggtgggtgcctgtaatcctagctactcaggaggctgaggcaggagattgcttgaacctgggaggtggaggttgcagtgaggcaagttaatgccattgcactctagcctggatgacaagagcaagactccatccaaaaagaaggaaagaaagaaagaaagcaagagaaagaaagaaagaaagaaagaaagaaagaaagaaagaaagaaagaaagaaagaaagaaagaaagaaagaaaagaaaagaaggaaggcagaaaggcaggaagaaggaagtcaggaaggcaggaaggcaggaagaaggaagtcaggaaggcaggaaggcaggaaggaaggaaggaaggaaggaaggaaggaaagaaagaaagaaaaaaactctagaggcctctgctgtgattcacctgagaaggcttgccaaaggctgcaaatagcatctttatttttcaccgacacctcaagatccattggatctcctgggtaatatggcccaagtggcagagcagcttgcacagcagcctggacctgttgcagagccttcttcttttctggaccacactcagaactggcagctttttgggtcactcaataaatgggccagagtaacacacccaaatgaggaataggttgcctccaaaacccaaataggcccactagacattgtgcctctttcttggttgtaggatgggccaaatgcagcaacttaccttttaccttagaaggaatatcttgacaggccctggaccactggacccctggaaattttactgagctagaaggtccctaaattttagtcagacttattttccatcctctggcatgcaaatgtctcatgaataagtctggtgtgtttgctatttcttgctcactggattcgatcagcataatgtcatcaatgcaatggacaactgtgatatttgcaaaagcaaaaagcgatagaggtctctttgaataagattatgacacaaagccagagagttaatatatccatcaggtaggacagtaaaggtgtattgctggccttgccagctgaaagcaaattgcttctggtgggccttatggacaggaacagagaaaagggcatttgctaagtcaatgtctgcataccaggtaccaggagatgtggtaatttgctcaagcaatgaaactacatctagtatggcagctgcaattggagtcatcacttggttaagcttacgataatccactgtcattctccaaaatccatctgtcttctgccaaatgaaagagttgaatggggatgtggtaggaatcaccacctttgcgtctttttagtccttaatggtggcactaatctctgaaatccctccacggatgcaatattggttttgatttactattttcccaggtagaggcagctctaatggcttccatttggcttttcccaccctaatagccctcaccctactactcagggagccaatgtaggagttctgccatctgctaagtatgtctatgccaattttgcattctggaactggggaaatgaccacagagtgagtcttgggacccacttgatcaactgtaagttggacctgagctaaatttctattaagtacatgacctccataagcctctactttaactggaggaccacagtgatgttttgggtcccctggaatcaatgtcacctcagagccagtgtttaatagtccccaaaatgtccaatcatttccctttccccaatgcacagttaccccataaaaggccagagatctccttggggaaagatgggagaaagattcactgcataaattgtcattagtgtagtgggctcgttcctcaagggaatctggcctctcctttattcaaggagttctgggtctgtaaactggctcaagtctggaaattgattgaggggccatgattctctgtttttatatttaaaattagtcttttttccatttgacctagaagttttctgcttgtataaattaagcaggaatgtagtaggtttcctatcaattttacttctaagatcactgtgatgaatcagccaatgctggaactctacagaagtcagactattctgattgccgtttagcctctgctgtccattacagtagctatgcccaccttgcctttgatggttgagtgccaccacttggcccctgccatcatgggatccaattattcccactgtatttaaattttgtagttgagagaccacggttcccactgttagatctgacatgcagagaaaagtaattacaaggttctttaaagattcaggtgctgctttcacaaatctattttgaagtcagtggtcaagggtatatcttctggactttccatgctggaattagtaggtctaaagtgactaatccactccagtatcccaatgtgcctaagccttttgattcctccctctacattaagccaaggggcatcaggcatttccagctcactcacaggggggccatcttttaatccatatttcagctaaccaagcaaataaactattagaagcttttttaactccccaagctgcaacattaaatgcagtattcctacttagtgggtccaaataaataaattcagcctggttcaactctatgttccttccaccataatcccacacccttaatattcatccccaagcctgttctccagatatctgtttatataaattagaaaactcaagcagttctttctgagtgtagtgtacctcctcatggggcacactctcaaactcacctctagggggccgctgggactttagtctacttatatgcctagaagcaaacaggggtgttgagggtgggtcctgagaagaatcaacattattttgcctggcaactttctcaggggaggccatcacagttgcctcaggcagtgcagggtttatctcagacaaaggtggaaaggctgatggcagcatgcatcagaaaggggatgttgccactactggggatggggaagctgttttttctgacaaaaagctcatcagagtttacaaactcagagcccctagcttcatcagggtcctcccatacgtccccattccaagtggcagggtcccattcttttccaatcagtgtcctcactttaacagtagacacctggtgaggctgtgcatacatctttcattgcaggtcagtcactaacataataagagtttgtgtgtgtttttccacaatttcatctacaggagatgagactctcacacagggcaatcttagcagatttgaggctcagtaactgcttctgaagccaaaagatagaatgcctgagttcatcattttctatcatcactttgtccattgaacttaggacaaccagcttcattatgttccttggttctccacatatggtcaaacctccacctcccagtttcaagcaattctctgcctcagcctcctgagtagctgggattacaggcactcatcgacacacccggctaatttttgtattttcagtagagagggggtttcaccatcttgaccaggctggtcttgaactcctgaactcgtgatccacctgcctcagcacccccaaagtgctgggattacaggtgtgagccaccatgctcagctggtgaaaggtatgtatagagtcactaaactccttgcctctcaagagtgataaatcaggagtgtcaaatgcatttattttacataactctctaaacagttcatccctaggactatcagtgttctccacactattagaagtagagtccttagcatttttgggtctaatcatattaagcagccaacccccgaaacaccagaatcaaaaaaagaactccatccttaatattctgttcctctagaaccactcctgttaccaaaatctgtattagtcagggttctccagagggacagaactaatggtgtgcgtatatatacatatatgttaattaagtattaactcacacaatcactagatctcacaacaggccatctgtaggctgagaatcaaggagagccactccaagttccaaaactgaagaacttggagtctgatgttcaagggcaggaagcatccagcacaggagaaagatgtaggctgggagactaggccagtctttcttttcacatttttctgcctgcttatattctggccacgttggcagttgattagattgtgcccatccagattaagggtgagtctgccttttccagccaactgactcagttgttaatctcctttggcaacaccctcacagacacatccaggattaatactttgtatccttcaatccagtcacgttgacacacagtattaaccaccacacctagttaagagagtcaacatctctccatttggctgagtccaggtgaaacagtcatcaccatttttctaagctgaatccagaaatgagtcagcattctacctgtgggcagattcacatatcacagtcacaattccaactgtgaattttttttttttttttttttttgagatggagtctcgctgtgtcacccaggctgaagtgcagtggcacgatctgggctcactgcaactcctgcctcagcctcccgagtagctaggactacaggcacccgccaccatgcccggctaatttttttttgtattttaactagagacagggtttcaccgtgtgttagccaggatggtctcaatctcctgacctcatgatccgcccacctcggcctcccaaagtgctgggattacaggtgtaagccactgtgcctgccccaaactgtgaatttttttggtgtgtgagatttagaacctcaccagtgggctctgtttatatgtgaaggtgacaatactaagtgttagctttgtctgcgtattaaagtcacaatctcacttgcatactgggccctgggataaaactttggactgccagagggctttatgtaatttccataagtgtcataatcttctgtgactctcataggtaggagctcaggcaggagagtcacaacatttgggtgctgggctcagagttatgccacaatcccttttttgggcatgtctcctgcaacagagaagaggcacattatgtagaaaattggttcagggatttgtcacaatgtcccctttggatggtgcacaggcaggtgaggagagtcacatcacccagataatggaactagcaatatatcacaatgccctctgatggaaggacaaagacaagaaagtcacataacctaggtgagaaaacctgacataggtcacaattcatgttatgagtagggatcatggaaaagaggagagtcacataacctaggggatgcacccagatatatgtcataatcactgcagtgggcagggcctaggcatgagaatcacatcacataaatgctgggcctggccatatgtcacaatccccacggtatacaggtcccagaataaagtagagtcacatcatctacatgttgggaccaaagatatgtatcaatgacacctgtgggcaggggccaggcagaagagccacagcacctgtgtgctggaccctgtgataagttactatttatctgttggcatggcctggtcagaagaggcaaatcaaaccacctgggtgctgggcccagtgatatgtctcaatgtcttccataggcaaagcccaggtaacagaggagactcacatcaaatagttgatgggcccagagatatttcacaatgctccctgtgagcagggtccaggcaggagactcacatcacctttgtgctgggccactattttttgtgtgagcagaacataggaaaaagagaagcgttggctgggcacagtggctcacgcctgtaatcccagcactctgggaggctgaggagggtggatcacctgagatcaggagttcaagaccagcctgaccaacaaggtgaagccccatctctactaaaaatacaaaatacaccaagtgtggtggcaggcttctgtagtcccagctactcaggagactgagacagaagaattacttgagcccaggagcggagttttcagtgaaacaagatcatgctactgcactccagcctaggtgactgagtgagactccatctcaaaaaaagagagaaaagcatcacatcacctgagtgctgagcccagatatgtcccaatccctctgtgagcagaatccatgcagaagaagagagtcaacatacatggatgatgggcacagagatatttcataatgtcccctgtaggaaaggcacaggaagaagtgtaacatcacttgagtgttggacagtgcaatatgtcaaaatagccaatgtggtcagggcacaggcagaaatcacataacctgggtgcagggcctgacagtgcatcacaatgtcctctatgggcagagccaaggcaggagaataggtcacatcagctaagtgcttggccaagtgatacgtcataatccctactgggggctggaccgaggctgggaagtcaaagcgctcagattctgggcagaagcatacatcagaatcacaccagcaggatgatcctgaaatgaaattaacaatcccacacatgtcccagtttcaggtatgagagtcaacaccttttgtaggtttggtttaagtacctgcatcacaatttcaacaatgggctggatttgtacacaaaagacccaatccctcctgaagactgtgtccccttaatgaagccacagcctcacagctgtggggaatcttggtctgagagtaaccaacccacctatggatcagagccacatataagagttaattcttcaacttcccactgcctctgagtgggagattcagagcctcaactgtggtctgtgttcatgtggaaggatgaccatctttactattggctacctgtgcataagagtgtcacaatattacctgtgtgctgggccctgtgaggacggtctctctatcaatcaagggctttttatgttatgcatgagagtcagaatttgctctgagacctccatgctggtatgaacccatgattgtactcatggccctaaacccatgtatgagagtcaacatctctttaattgacctgctccggagaggagattcctcaattgcccatgagatggttttagaaatgagtcaccatctcatttgtggtcaggtgtttacatatgacagtcacaattccaactgtaagctgcatccatgtatgaagttcaagaactctccagtacactgtgtccttgtgtgaatgcaataatcctaataattggtggggtgtgcacacaagataaacagtctcgtctgtgtgctgggcctgtgatgacactctctgtatcacctgagggctttatacagtatgtgagggagtggaaataatctatgaccttcctacaaaaaggagactcaggatcttacccatttctctaagcttagctacaagagacagtatctctcctggtgactggtatgagagttattattgcacctgtcagccaggccaagatgtatgtaacaatcccatttgtcagtagagagtgagcaggatggtcacatcacatgagtgctgggaaagggtaaaatcacaatcatttttgaggccagggaccagggataaaagaaacatcaccttagtgctaggccaagggctatgttccactgttttctgtgggcaaggtgcaggcaaaacaaattcatcacctgttgctgggcccagcgatgtgtcacaattttccctgtgggcaaagtggaggctaaaaacaagggtcatatttcttgggtcatgatgcagagatacatcacaaggcctcctgtggacaggccacaggtagaaatcgccaatttcctaggtgttggagcccacgatatgtcaaaatacacaatgtatgcaaggcccaagcaggagaaaagattcacataacttagatgctgagcctagcaatacatcccaatttcttcttggacagatcccaagagatagaagagtcttatcacacaggttttgggtctagctatgtgtcaaaatattccctgaagggagagatcagaaaggagtgtaacctcacctaggtgagaagcccagagatgtttctgattctgtgtaaggctcaggaataaggtaagagtcaggtaacctagaaactaggctagattatatgttgcaattacccaagttgggggggggctctcatgagaagggagttacattatgtagctgctgagctaaacaatgcatcacagttcccactgtgtactggtcccagaaaggagagtcccatcatctaggtgatgggcccagaaatctggcatatgcatcctgcgggcaagtaacaggcagaagtatctcagcatgtctgtggtaagcccagtattaagttactctcccttctatgggcatgatccaggcagaagaagtcacatcacctaggtgctgggcccagagacatatcacaatctcttttgtgggaaaagacaaggtaaaagaagagactcacatcaaatagttgatgggtctagagatatgttacaatctttctgtgggcagggtctaggcaggagactcagtcactgtggtcctgggcatagcactgtgtaaaaatgctttattttggaagagccaaggcagaagaatatcacctgtctgttagcctagtgacatgtcacaacatcccctgaaaaccaaaccttgaaagaaaagtagaataatgtcagctaggtgctggtcccaattatttgtcaaaatccttcttttgagcagaaattggtagaagaggattatcaaaacacaaagttgactggtgcatagatatgttacagaaaaccttgtaggcaggaccaggccagagagttacatcacccaggtatcagactcagcaacatgtcaaaattgcccatatgggcagggcacaggcaggggttttcacctgtgtgctgggctctgttggaacactttctgcaccgcctgagggctttgtagagtgtgcataaaagtcacagtctgctctgagacctttctgagcatagttggcaaggtccagattacagagtccccactctctagttgacagggtctagatcagagagtcttcacctacctatgtactgcatttattaatgagtcaccaccttaattgtggccaaatgttaatatatgacagtcacaattccaactttgaactgtgtccacctgtgagattcaggagctcactagctggcttttgccatgtgtaagggtgacagtcctaacagttggcagtttctgcattttagaaacaatctcacctgtgcgctaagccctctgaagacattctttgtgccacccaaatggtttatgaaacacaccaaagattggtaattctttctttcttctcttttttttttttttttttgagagggagcctcatctcactctgtcacccaagctggagtgcaatggcatggtctcagctcactgcaacctctgcctcccgggttcaagtgattctcccacctcagcctcttgagtagctgggattacaggcacatgtcaccacacccggctaatttttgtatttttagtagagacagagtttcactatgttggccaggctgctctccaactcctgacctcgtgattcacccaccttggcctcccaaagtgctgggattacaggcatgagccacactgcccagtcagattgataactctttatgacattcatacaaagaggaggcccaggatcttacttgtttccctaggctacaatacaagagacactatctccctattggctgattccaggtacgggaatcatcatagcacctatgagttgggccaggatatttgtcacaatcccaactataagtagaaaatgagcagaagagtcacatcacctgggtgctgtatgaggaatgtcacatttccaggaagcagggcacaggcagaagggtcacataacctggtggccgagcccagtgatattttacaatgctccctgtgggaaaagacctgccagaaaagacacatcacctggttactgggcccagcgatatgtcacaatcttctctatgtgcaggatgcaggcagaaaaagagtcacatcactttggtgatagatgcagacatatgtcacaaggccgcctatgggcagggcttattaagtagcctctgatccagtcctgtaggtgttcggtccagctacatgtcacaataccaaaaatatgcatggctcagcaaaagaaaagatttacatcacctaagtgctggatccagtgatatgtcacaatcctcttctttggcatggccgaggaagaagtagagagtcacatcacctaggcgttggaccaagccatatgtcacaatacacaataaatgcagggctcatgaaaagagagtcagatctcttaggtgtggaacagtggtacatcacaatttctcgtttgtcagagccacatcacctaggtgcttggtccagtaatatgtcaaaattcccttgagaggtgagcccaggaaggaaagtcacatcatttcggtgagaagcccacagatgtgtcactattttccctgtgaatagggctcaggaagaaaaggatagtcacatcatttaaatgatgggcccagagatggattacaatggctcctgggtacaaaaacaaggcagaagaattacatcacctgtgtgctgggtccagtgatgagtcactttcccttgtgtgggcatggcttcagcaggagacaagagtcacatcactaaggttctggttccagagatatgtcataatctctcctattgacaaagcatgggtaggagaggagagtcaaatgaagcagttgatgggcccagagatatgtcacaatgcccccccccccacccccaataggcagagtacaagcaggtgcctcccaattctttaggtgttatggtcagggacatgtcacaatacttaaaaaatgcaagacccaggcaataaaacagagtcacatcacctaggtgctaggttcggtgatatatcacaatccctaattcaagagggctcagggaaataaaaagagtcacataaccaaagtgataaaggtaaagatatgtcataatactcctgtgggcagagtccattcaggagagtcacattaccttgatgttggacccagccatatatcacaatacacagcatatccagggctcaagcagggaagaaaaatcacatcgtctagttgctgggtttgatgatatgtcacaatcacttgtttttgcagaacccagacagaaaagaagagtcacatctcctagttcatggatgcagagataagccaaaaggttccttgtgggcaggacccaggcaggaggctctcgtgccctaggtgtttgtctcagccatacgtcacagtacctaatatatgcagggcccaggcaaacaaggagaatcataacaccttggtactaagtttagtgatatgttacaatccccacttttggcagggccaggatgcacacacatgcgaacaaaggcacatcacataggtgattaaaaaaagaaaaaaacatatgtcataatacccctgtaggcagggcccatgcagaagagtctcatcaactaggttttagacccagttatttgtcacaatacacaatttatgcaagactcagacacaagaggaaagtcatgtaacctaggtgctgggtccagtgatacattagaatctctccttgggtagagtccaagcagtagaaaagagttacattacctgggtacttgctccaggaatatgtcacaatacctcctgaggaaagagtccaggaaggggagtcacatcacctaattgaggggcccaaagatatatttcccagtgctccttgcaggtagagctggggataatcaaaagagtcacataacccaggggctgagcccagctatatgtcacaactaccctaggtgcaagtctctggtatgagagaagagtcacattacataggtactgggccaagtaatatgtcacaatctccactgtaggaaggtctcaggaaaagagaagagtcacattatctgggtgatgggcacaggaacgtatcacaattaccctagacagaagcgttacatcacctgtgtgtgaggtccagtgataagccactcttccttttgtgcacagggtccaaacaaaagatgaaagtcacatcacctaggtgctgggcttccagaattgtctcaatccctcctatggtcaaagccaatttaagagacaagaattatattagctgctctgcctatggagcagctttttttgtttgtttgtttctttacttctctaataaacttgctttcattttactgcatgggatcaccctgacttcttggggtctggattaaaagcccttttcagtaacagctttctggcaaattataaagggactatactgaggagaaaactgaaccaaaggaaataaactgcagcaccaattagccaactttgggtaactagtggggtatattctaccagggtaaaaaatgggattgggttagaggcccaatatagaagcagtacagtctctcctaagacatattgggttaaagacctctcttaataaaaagcttgaggacccagttatgaaggttcaagtcctttctaagatttaaggggttggccaggcacggcggctcatgtcagtaatcccagcactctgggaggctgaggcaggtggattacctgacgtcagaagttcgagaccagcctgaccaacatggagaaaacccatctctactaaaaatacaaaaactagctgggcgtgttgacatatgcctgcaatcctagctactcaggaggctgaggtgggagaatcacttgaacacgggaggcagaggtagcggtaagccaagatcgtaccattgcactccagcctgggcaacaagagggaaactctggctcaaaaaaaaaaaaatttagggggttagaggcccctctcagtaatgtcactcttggttaaaaaatcgacgaggcaggccaggcacggtggctcatgcctgtaatcccagctactcaggaggctgaggcaggagaatgtcttgaacctgggaggcagaggttgcagtgagccaagatcgtgccactgcactttttagattaattttccctgtgctctttgctgacagttgtgcgtgacacgattaggcatgtacaggatcataagacatggggagcttctattctcctcaaaaggggaaactttaggtatatctcctaatgctatccctcccccctccccctaccccacaacaggccccaatgtgtgatgttccccttcctgtgtccaagtgttctcattgctcaattcccacctatgagtgagaacatgcggtgcttggttttttgtccttgtgatagtttgctgagaatggtggtttccagcttcatccatgtccctacaaaggaaacgaactcatcatttttttatggctgcatagtattccatggtgtatatgtgccacattttcttaatccagtctatcattgttggacatttgggttggttccaagtctttactattgtgagtagtgctgcaataaacatatgtgtgcatgtgtctttatagcagcatgatttatattcctttgggtatatacccagtaatgggatggctgggtcaaatggtatttctagttctagatccccgaagaatcaccacagtcttctataatggttgaactagtttacagtcccaccaacagtgtaaaagtgttcctatttctccacattctctccagcacctgttgtttcctgactttttaatgatcacatgtaacaaacctgcacgttgtgcacatgtaccctagaacttaaagtattttatatatattaaaagaaagggggaaacttgagagctaatgaaattgctggaaaagatcccttcatgactgagaagtcaccgcctgaatttctcagtgccgctgcaatgggtgggtctttcactggcgtccctgagctcctccctttccccaacctgcctcaggcaatgcttttctttccttctctcctctttctttcttatcttttctgttatttagtgcaactgtcctttgtggttttttgtttgtttgtttgtttgttttgagatggagtttcactgttgttgtcagggctggagtgccatggcgcattcttggctcaccacaaactctgcctcctgagttcaagtgattctcctgcctcagcctcctgagtagctgggattacaggaacttgccaccatgcctggctaatttttgtatttttagtagagacagggtttcaccatgttggtcaggctggtctcgaactcctgacctcaagtgatctgcccaccttggcctcccaaagtgctgggattacaggcgtgagccaccacacccggccatgtgtgatagttatatatgaaagagttctgattaattggcttaaaaataataaatgcttaagtctaattttttttcagaaaaggaacaaacgtaatgccttttatctcatgtgacataagtaatctttgggaactaaaagcagttttacatgcaaggtgtgtaagaaaagtagaatgtgcttttggtaaatgatcataagatggcataaaaatgttaatttttttggcctagtttagagggctaaagagttgttttaagttaggattgagctgaaggtttgagcaagttttggaaggtttgtaaaaattaagcttgtaaaaaaaattctgtgtgtgaacatattggctaaagttaaagagatattattcagttttttttgttttttcttttttgtttttgagacagagtttcgttcctgttgcccaagctggagtgcagtggcgcaatctcagctcaccgcaacctctgcctcccaggttcaagtaattctcctgcctcagcctccctagtagctgggattacaggcatgtgccaccatgcccagctaattttgtatttttagtagagacggggtttctccatgttagtcaggctggtctcaaactcctgacctcaggtgatccatcagccttggcctcccaaagtgttgggattacaggcgtgagccaccatgcctggcctgtattcagtttttttaaataaattaaacattggaatataagtacaacgggtttttttttttttaaagcacagatctgttccttaacaaaaattgcagagttattaaacgtttatgaaaatcttgccttatggtcaaactgattaagattggatagacttgtatataagattttattaaaaacttgttttggccaggtgcagtggctcacacctgtaatcccagcacttcaggagccaaggagggaggatcacttgaggtcaggagtttgggaccagcctgactaacatggtgaaacccgtctctactaaaaatacaaaaattatccaagtgtggtggcacatgcttgtaaccccaaatactagggaggctgaggcaggagaattgcttgagcccaggaggcggaggtttcagtgagccaagatcatgccactgcactccaccctgggtgacaagagtgaaactccatctcaaaaaaaaaaaaagaaaaaactgggtttgaaatcaatagtacactaattcatacgtgaaatgtaggcttctcttttaaacaagatttttatattatattttgaaaaatgaaaaatttttgtctgccttttgaataaactacaagaaaaaaaagacaggagacaaatagtttggaaagctaagtctttatcaaaaaggaaaggtttttgcctttttaataatctttaagaaggcaagttatttttattattatttttgagataaagtctcactctgttgcccaggctggattgcagtggcgtgattacctcactccaacctccacctcccgggttcaggtgattctcatgcctcagcctcctgagtacccgagattataggaacacattaccctgcccacctgttttttgtttgtttgtttgtttgttttttggtcattgtttgtttgtttttgagatggagatggcttccaactatgtctacacagtccctgtgcagggttcctgacccatggtaagtaaggaatgtcatttcttttttttttttttaagacagagtttccttctatcacccagcctggggtacaatggtgtgatttcaactaactgcaacctctgcttcccaggttcaagtgatcctcctgcctcagctgcctgagtaactgagactacaggtgcatgccacgacacccagctaatattagtatttcatgtcaagatgggttttcaccatgttgagcaggctggtctcaaacttctgacctcaggtgatccactcaccttggtctcccatagtgctgggattacaagtgtgagccactatgcctggccaggaatgtctctttctgacagaatcaggagcctgaagttgtcttgggaccccaagaagagagaaattcacccaactcacaggtatctgatggtacaaacccatggctgggcttggcttttaaaaagtcttttctgatattcctttaatggaacatagttatatcaaagccaattttaaaaacctatgtgaaaaataattatttttgctgcactttatacaaataatcaggccaactataagactaaagctttttatgcaagtaaatcagttttaccatgatttgtctttagtagaaatggaagactggagagagaaaaaaatcatgtttcaagaactatggtacacctgttgttacacactagtctcatttgttgtttttgagtattttccctgctatttagactaattctgcttattcctttgaacacaccagtgatctctgactgcagctcaaaagaaacaagagagatgggtaatataaaaatccagatcaggcaccaggcacggtggctcatgcctgtaatcccagcactttgggaggccgaggtgggcagatcacgatgtcaggggttcgagaccagcctggcccacatggtgaaaccctgtctctgctaaaaatacaaaaattagccgggcgtggtggcacgtgcctgtaatcccagctactgaggaagctaaggcaggagaatcacttgaacctgggagccagagttgcagtgagccaagattgcaccactgcactccagcctggccgacagagcaagactccatctcaaaaaaaaaaaaaaaaaatccggatcactaatctaattctgaacacatattggaatcaggtagcaaacccatatcagcttcttcccaacatttgcccttatttagtttacttgggataattttacttattttactttacttgggataattttacttattttactttactgttgtggattatattgttgttgtgctctttgtgtagaaatgcaagataagcttgctcaatgttttcttaagtagaacacttaattttgcagatatcaacatttgttaagaactcaagacttataaatgatccttgtaatattgatgctttctcacctggctgggcatggtggttcacgcctgtaatcttaacactttgggaggccaaagcaggtggattgcctgagatcaagagttcaagaccagcttggccaacatggtaaaaccctgtctctactaaaaatagaaaaatcagctgggcatggtggtgggtacctgtaatcccagcttctcatgaggctgaggcaagagaatcgcttgaacccaggaggcggaagctgcagtgagctgagatcgtgccactgcattccagcctgggcaacagagtgagactctgtctgaaaaaaaaaaagaaaagaaagtaggaaagaaagaaagaaaagaaaaaaaaaaaagaagagtcaaatcacctaggcgctgggcccagagatactctataacccctcactgggcacagccaaagcaggagaaaaatttacataacctagatgctgggtacagcagtatgtcccaataccccttgaaagaagggtgagccagagagtaatatcacccatgtgagggaccaaaaggtatgttacaatgccttctgtaggcagaggacagggtggaggattacatcaccttcatgttggactcagcaatatgtcacaatggcccatgtgggcaaaacacaggcacgagagtcacataacctaagtgcgaggagccacaatatgtcaaagttgtctctatgggcagaaccaagacattgactaagcgctggtgcagaaagatgtcactacccagtctgtgggctgagcccaggcaggagcataaaattgctcaagtgctaggctgaggtatatgtcacagtcacagctacatgaaggtccagagatgagattaaccatcctgatcatgtcttggttctaggtatgagaggcaccacctcctgtatgttgggtataggtgtataacccacaatctcaacagtttgctgaatccatccataagagcctcaatccctcctacagactgtgtccctttagtggagtcaaagcctcacagatatgctggatcttggtcttagtgtcaccaacccacctgtgaaccgaatccatgtatgaaccagttttccatcttcaactttctttggatgtgagattcagaacctcaacagtcagctgtgttcatgtggaagaatgacaatatttactgccagctgggtacatatatgagtgtcataatcgcacctctataccatgctctgttaggacaccctttgtatcacctgagggatatgtatatatgataatgggtgtgtgtgtgtgtgtgtgtatatatatatatatatatatatgataatgtgtatatatatatatgataatgtatatatatatgataatgtgtatatatatatgataatgtgtgtatatatatgataatttgcatatatatatgataatgtgtatatatatgtatatatacacattaaagtcacagtatgctctgagactttgtgcatctacagactcatgatcctacctgtggccccaaacccaggactaagagtcaacatctctccattgaatgcatccaggtagaaaggatctaacttgccagaattagaaatgagtcaccatgtcaactgtagctggatgttcacatatgacggtcacaatccaaactgtgggctgtgtcaatgtgtgaaattcaggacctctccaatggggtctgtccatctgtgagggcgacagtcttaacagttggtggtatgtgcatataagaaacacagtctcacctgtttagtgtgccctgtaatgacactttctgtaccactcaagggctttatataatatgtaaaaaatagtagtcttttatgaccttaatacatagagaagacccataatctctctcattttcctaagtctggttatgggagacagtatctcttctattggctggtttgaggtataagagcatttaataaacctgtgagctggacaaaatatatgtcacaattctacctgtgggtaggaagtgagcagcagattcacatcacataggtttttggcaaagatatgtcacaatctttcctgaggtcagaaaccaggcagaagtcatatcacctaggtgttcagccacagatatattacaatcccctcttaaagcagagtacaggcagcagagtcatttcacctgggtgctgagcccagtgatatgtcaaaatgctctctgtgggcacagccttggcaggagagacacatcatctggtgactgggtccagcaatacattacaacattttctgtgggcaggatgcaggcaaaagaagagagtcacatctcttaggtgatggaggaagagacatcttacaaggcccctcatgggcagggcacaggcaggagcctcccaccctgaaggaatgatgcccagctatatgtaacaatacccaagatatgctgggcccagggaaaacagaagagtagcatcacttaagtgctgggtttagtgatgtgtcaaaatcccccattttgtcagggcccaagcagaagagaagagtcacatcacctaggtgatgaatgaacagatatgttataatacctctgtaggcagggcccaaacagatttgcatcacaaaagtgtttggtccaggcaggagaggaaagtcacgtcacctaggtgttaagcccagtgacatatcacaatctgttcttgggcagagaccaagaagtagaggaaagtcacttcccctgggttctagggccagcaaaatgtcacaatgccctctgtggaaagtgctaaggcaaaagtgtagtctcacaccacctagatgctgggttcagtgatatgccacaatttcacctgtaggacctaggcagaagggtcaaatcactcagttgctgggaagagctgtatgatacaatcacacatgcaagatggtgtaagaatgagattaacgatcccatacatgatctggttcaaggtacgagagtcaatacctactgtatgttgtgtctaattacacgagtcaccatctcaaaggtgaactggatctgtgtattaaatcctcaatccctcccatgaactgtgttccctcagtggagtcagaggctcacaggtgtgctgaatcttggtctgagagtcaccaacccatctgtggacaagatccatgtatgtgattcaatttttcaactttcaactgcctttgggtgtgaggttcagaacctcaaaattggctgggttcatgtgggaaaatgacaatctttactattgtcagggtgcgcacaggagtgtcataatctcacctgtgtgcttggccctttaggacactctctgtactaccctagggctttacatggtttgcatgagagccacaatccagcttgagattttcatgctggtataaacctatgattgtatctgtgtctctaagcccagttatgagagtcaacatctctccaattttctgggttcagataggagagccctcactttcctatgagctgcatttaaaaatgttttgctatcactgggtgcagtggctcacacttgtaatgccagcactttgggaggctgaggtgggtgaatcacaaagtcaggagatcgagaccatcctggctaacacggtgaaaccctgtctctactaaaaatacaaaaaattagccaggcgtggtggcgggtgcctgttgtctcagctactcaagaggctgaggcaggagaagggcatatacctgggaggcagagcttgcagtgagccgagatagtgccactgcactcctgcactcctgcactccagcctgggtgacagagcaagactccatctcaaaaaaaaaaaaaaaaatagttttgctatcccaaatctggatggacggtcacatatgacagtcacaattccaactgtggactgcatccatgtgtgggattcacaattgcagtctgtccacctgtgagggtcacaattttaacaggtgcttggttgtccatacatgcaagtcaatctcatctgtgtgctgggctctgtgatgacacactgtgtacaatccaaaggctttataccataggtgagagtgtggtaatcccctctgaccttcataaaaataggagaccctgaatcttaccaattttcctaagcctagctatgagaagcagcatatcaactgtcgtctggtttaagatatgagagtcatcatctcacctgtgagatgggacatgtaacctgtgagtaggtagtgagtaggagagtcacatcacctgagtgcttggccagagatttgtacaatattccccgctagaagggaccaggcaggagaggactatcacctgggtgcttggccagagatttgtacaatattccctgatagaaggtaccaggcaggagaggaacatcacctgggtgctgagcccagtgatatgtcacaatgctccctttgggcaaggttcaggcaaaagaaacacatcatctggtcagtaggcccagcaatatgttacagtcttctctataggcagggtgcaggtagaagaggacagtcatatctcactggtaatggatgcagagatatgtcacaaggccttctgtgagcaggacgcatgcatgtgcctcctatcccctatgtgttgagtccagtgatatgatacaatacccaaatatgcagggcccaggcaaaataggagtgtcacctcacctaggttctgggtccagtgattcattacaatccccttttattggcagggcccaggcagaagagaagaggcacatcacctaggggatgaatgaaaaaatatatcttaatacccctgtaaatagaacccacgcataagagtcacatcaactaggtggtggacccagccatatgtcacaatacacaatgtaggcagggcccaaacataaaaggagagtcacatcttctaggtgctaggactagtgatacatcacaatccctccttgggcagagtctaagcaggcaaggggagtcacatcacctaaatgctgagtccagcaatgtgtcacaataactcctgagggaagagtccaagcagtattgttatatcacctgggtgctgggacaggaatatgttgcaatcttccttgaaagcaaagactaggcaggagaatcacatcacctagtttctgggaccagcaatattgtcacagtgcttcccagtggactaggcccaggctggagaaacacatgacctggttgccagacccagtcacaatcttccctgagggtagagaacaggcaggaaaaaggcacaacccctacaagatagatgctgagaaatacaataagccccctctagtcagggtcaaggtaaaagtctcttatctcctaggtgttggacccagcaatatgtccaataccaaaaatacgcaaggcccaggtaaaagaggtgagtcacatcactaagatgctgggtccagtgataagtcactattattctttctggcagggaccaggcagaaaatgtgattcacatcacctaggtgactaacgacatgataggtaataatgtccctgggggcagagcccatacaggagaatcaaatgactcagacattgcacccagacacatgtcacaatagcaatgtatgtacagcccaggcaggagaggagagtcacataacctaggtgctgggcccagtgataaatcacagtttcttattgggcagagcacaagtggtagagaagagtcatatcacctagttgcttggtctgacaatatgtaacaataccccctgaggagcaggctcaggcaggagagtcacatcacctaggtgatgagctcagagatatgtcacaatgccctcaggtgcgtagggcttaggaagaaaagaaaaattacataaactaggtccagggctcacccatatgtaatgatcaccccagtgggggagcacccaggcatgacaagagagtcacatcatgtaggagctggctcaagcaatatgtagcaatctccattgtggacaggactgaaaaaaagactggccacatcagccatcaaccatgtgatgaaatcagaaatatgtcaaaattattcctgtgagcaaagaccaggcagaagaattacatcatgtgtgctgggcttagtaataagtcactctcttctctgtgggcatggtccaggcaaaagaaaaaagtcacattacctaggtgctgggcccagagttatgtcacaacctcttctatggagaaagcccaggtaaaagagaagagtcacatcaaatagttgatgggctcagagatatgtcacagtgccccttgttaacagggtccaggcagaagacttacatcttcttcgtgctgggttcagcagtatttcacaatgttgtttgagagcaggaccaaggaaagagagtaacataaccttggtgttgggcccagtgatatgtcacaatgtcccctgtgggcaaaacctagaaaaaagagaggaatcacattatctaggtgctggacctggcagtctgtttcaataccctctgtaagcaggaactaggcaggaaaggagagtcacatcacctatgtaatggtcacagcgatacgtcagaatgctctctgtaggcaaggcctaggcaggagatttacatcacctgggtgttacactcaggaatatgtcacaatggcccatgtaaggcacaggcaggagagtcacataacctggatgttgggtgcagtgatatgtcacagtgttccctatgggcaatgccaagtcaggagaatagattcccatcacctaggtcctgagttcagcgatgtgtcacaatcctatctgtgacctgagcccaggcaggagagtcaaatcactcaagtgctggacaaaggcatatgtcacaatcacagctgcagggtggtccataaatgagattatcaattctgcacatgttcaggagttacaatctcaactggggactttatctctgcatgagagcttctatttgtcctgcacgctgggtgtccttagtggagtcaaagtctcttaggtttcaggtatcctgaatcttggtctgagagtcaccaactcatcctattgctgggtcaatgttgcagcagacctgtacccatacggattcactgccagtaacaggtaacaggtaggagagaacagtaacatctcctaggtgcttgatccaaacatgtcacaatagcctctttggggagggctcagatgaaagagtcccattatctaggtgaagtgtttagagatatgtcacaatgctccctgtgggcaggactcaggaagaagagaagagtcacataacctagaagctgtgcccagctgtatgtcacaaccagcccagtgggaagagccaaggcatcagatgagagtcacatcacataggtgctgggtcaagtgatatgtcacaatctccttttgtggacaggacccaggaagaaaaaaagtctcacatcatctaggaggagagcccaaaaatatgtaacgatgattctcgtgggcaagaatcaaggcagtagagtgaagtcacctgtgtgctggacccatgggtaaatgattcttccttttgtagacatggcccaggcacaattacatcaactaggtgctgtgcccacagaaatattacattctctcctatgggcaaagagctggcataacaagataatcgcttcaaatagttttgagctttcagagatatgtcacgatgatctctgtggtcagggaccacgcagaagactcacatcatgttggtggtgggcccaacaatatgtcacaatgttttctgagaagaaggtcaaggtaaaagagtaatgtcactttggtattgggcccagcaatatgtcactatctcccatgtgagcagagaccaggtaagagaagagaatcatatcaccttagttatgagcacagacatatgtcacaaagccccaagtaggtagtgccaaggcaggagaatactgtcacattacctaggtgctggatcctgtgatatgccgcaatccaatttgtcagctaagacctcacaaaaaagtcaagtcactcaggtgctgggagatgcaggaagattcgggggtaagattaataattccacacatggcagggtgtccacagttctggccccagaccccaggtcccggccagattccccaaagtcagaggctggaatctggtggtggatgtagggtgtcagctgagcccaacccctgcccagcggtggccagcatctaataattagtaactccacacagcggctcacacctgtaatcccagcaatttgggaggctgaggtagacggatcacctgaggtcaggagtttgagaccagcctggccaacatggcaaaaccctgtctctactaaaaacacaaaaattagccgggcattgtggcacatgcctgtaatcccagctgctcaggaggctgagaaagaagaaacgcttgaacctaggaggtggaggttgcagtgagccgagatcatgccactgcactccaacgtgggtgacagagcaacagtccatctcaaaaaaagaaagaaaataatgataataataattccacacatgtcccagttctaggtatgagggtcaacacctcctgaatgttgagtctaagtacatgagtcacaatctcaacagtagactgcatcaaagcctctattcttcctgcaaactttgtcttcttagtaaagtcacagccttacaggtttgctgagtcatggtgtgagagtcaacaaccagcctgtaaaccagatccatgtgtgcaagtcaattttccatcttttgaccacctttgggtgtaggattcggaacctcaacagtgggctctgtgaagtcaccagctgaagggctattcatgcacgaaaagttgttattttatcatcattgtttctattgcttttaccttgctaagaatacatgtgtagcttataattgtgctagaaaaccataagggttttggttaaattacccgttgttgtatgttatgaaatagacaaaaaattggcaaaaatagattaaaattatacaaacttggtgtcaactttctcttgggcaagtttaggaaagacagacctggaaataccccagtaaaaggctaatcagaatctcagaaaaattgcaaccattagtcctttatctacctatgacctggcagctcccgccctgcttcgagttctcccactttcctggacaatgtacaccttccatatatcgattaatgtctcctgactcctaaaatgtataaaatcaagctgtgacccaaccaccttaggcccgcgttgtcacgacctcgtgaggcggtgtcacgggtgtgtctttaatcttggcaaaataaactttctaaattgagacctgtctcagatactttggggttcactttactaattttaggtagaatttaaaattcttaaaatagaaacaaacataaggactaaactgagaaaaactttaaaaagtatactcaaattcactgacacaatcatgggtatatctaaataatgagattccgttttaagtaagaagaaaatacgtaattacgaaggaggctttacctttgggaaaacaaaaagccacttttgaccaattattcccacagatacacacccgggtccccaaccacccgccaggagggcccatcctggtgcctggaaggcgggggttcctgcgatctggggttgggatttcggctcaggccgtgcgcggtggccttgggtcgcgcccgccctgcctgggcccccagcccaagggaccgagcgggtgcgggcggggcgggcggggcgggcggggcgggggtgtcgggggctcggactcggagccgtccctgccagtggctttcgtgggcggccccgccttggagcccaggccaacgagccgcgcgggacggaagagctgcgggtggggagggacaagcgggcggagaaggggcggccctgctggaggcccagcgagtctgagtgattgacaagtgaatgagctgggaatgaagactcctggggccgggagggagagagggggttggagggtggtgaatgcctgggcctctggggctccaggctgccagtggcccgaccaggctctcggtgtcctcctccaacctcagtttcctcacctgtcccagaggacgaatatgactgttgtgatgattaggccagataatcctggtaagcatttattagcctgcctggtctctggatattttttttttcttggtaaagacattttgccgcccaatatctactattggagagagagtttgggaggcagaaggtaggactcacccttggcttcagagtcccttatgggtgccccatccccttaggttcaattaaagcacatagttggaaacaagtcccctacccaggacagctacagagtccagaaccagaagatcttgttttctgaaccaaggactttgtcttatccccaaatcctaattcctcagggtggtcagcttcagacaggagtctgaaattgattctcgctctccggggtggatccaaggctcttgtgatgcggtgttgttctaccccatcccacccctgtgcctcccccaatgcattgggagtccttaaccgtagtgacttcaatttggaaacaatgctcccaaagcaggagatgtggccctccccaggcagctggcctgataaacatctgtcctggggcaaaagacccagagcagggagggactctcacttcccactttcacatgctatagtcatttaatgggctgtggtgacatctctgggtcacctagcctgcagaatgggatgttgactttgtgccacaatgagggaaacggaggcacagggctagtgagtgaaaaaaatcagaaagactctgtgactaggaaacactattcaggcccacggcccctacaggactcagcatcctttggggtgcaccagtgggtggtatgcggcaccctggttgccatctgtaccttatgggggtgagggtgacggtgagtgtcctggcaggacaaggtgctctaggacccacgaggtagatagacattgcccgcctttccctggctgtgggcacagcaagagttctgttctctaatgtatgtgaggaccagtgcctacatgcaatagacacttctcatttcagacattccaaagattttaggggctgcatagaaagaaactgagacagactctaaccacatcctcacactgacaggagcctccagtctaggctcagctctgactcttcctggggaggtttgctccaccctcgtccttccaactagaacccactcccggtaggcctgtgcacgcccatcttttacagcagcagcatgtcttggtaacttgacattttctgcaataatcttgctgtttgttgtttacttctttagtgtttgttcctggcagctgtgtctagttcaccactgtgttcccagtgccaagcacagtgctcggcccgtgggaggtgctcaatgagcagttgtttaatcaatgaacaatggctctgtctatgccagggaagcaggagtaggtcagagcacaccttagctcacccatttcctgtctgggtgaccttggataagtcctgaacttttttcctttcagtcaccttgtctgtgacatggagattaattaaacttacctgagttatttctgatgagaatttaatgcgcaaaagtatctaaaatgcttctaaacacaggctggcacagtgagagtgcggcacacatgtgagctgtttgcattatcatgccgcaggttgttggaattctttttcactcatcatttggatcttgaaactctgtttacctcattgcatataaggaaaatacattttgaattatgtttagtatttcacactgaaattatttaaaatgtctatagctaggtaagatgtggttgctcatgccaccatcaaaccacagcactccagcctaagtgatagagtgagatcctgtctcaaaaaatacatgtaaatagttggctgggcgtggtggctcacacctgtaatcccagcactttgggaggccgaggtgggcaggatcacaaggtcaggagatcgagaccatcctggctaacacagtgaaaccccgtctctactaaaaataaaaataaaaaatagctgggcatggtggcggacacctgtagtcccagctactccggaggctgaggtaggagaatggtgtgaacccgggaggcggagcttgcagtgagttgaaatagcaccactgcactccggcctgggcaactgagcgagactccatctcaaaaaaaaaaatacatataattaattgatatttatatatgattcctgtgtgctgcataactcttgtagcacagagttgtttattttttagataatgtacattacacagagttgtttattttttagataatgtacattatttgcctttttcagtgatatttttgtattttatattcagttgaaatagcatttctattagttgtacaaataaatatattatttcctattttcagctaataaccatagctgcatagttttaaaatattttattaacttatctggaagagttgataagataaacttattttatattttgtgtatgaacatataaatatattttatgtttttgtgtgtgaatatataaaaatattttatattttgtatttgaacatataaatatctggacactgtaataaactgataatacatttcaaatgcttttgttaatcactctatttttaatcactctattttagattcatcctttttatacattctatgaatggatggatggagaatacgtagacagatagtatataaatgtatgtgtagataaatgtagatgcaaatacacatctgttgagacaatgctgctttcaaaatcacagagaatggtcacattttaaccttttatggaattaaataaaacaaaagattttctatttttaattacatttacattttaataatacaatacataaataacatatttttaataaaattctggattccatttaatattatattattagaacttctgtatctattctgacacttgagattaactttaactttccttttgctgagtttgcccagtttttatttgaagtaatactacatcatgggatcaccttagaggctttctatatttatatgttttgcatcagtttctaaaatctggaaattatctcattttgaatttcttatggaaatagaatcttccccactaaaaatatcccattagtatactgcactttattattattatattttttttttccaagacagagtctagctctgttacccaggctggagtgcaatggtgcgatctcggctcactgcaacctccgcctcctgggttcaagcaattctcctgcctcagcctccgaaatagctgggtttacaagcgcctgccaccacgcccagctaatttttgtatttttagtagagatggggcttcactgtgttggccaggctggtctcgagctcctgcccttgtaatctgccctcctcggcctcccaaagtgctgggattacaggcgtgagccactgtgcctggctactgcactaaatgtttctctttctggttatattatctatataatatttagttatttttatttattttaatttgctttcaattttcgtatttgcttttgaaattacttttttaactggcataatattcccttggattctattaatgaacgtccgtgctgttttatattttgatattaaaaataaaacctcagtgtggatgtgatggctcatgcctgtaattccagcattttgggaggctgaggtgggaggattacttaagtccaggagtttgagaccagactgggctacataatgtggctgcctgttgtctaagtcatctgaactcccttggggaggggcagcagccatcactgcagctgctagctaccaatgacactaagcccctggggtgcaggggagggtggcagtcatcactgtagctccaggccatgctattcccctgttggagccaaggaggttagaccgcttggtcccaagaggcattccccacagcacagcacaccagctgttgcagacaatggcctgactctctctttaggccagaccttcatccatcccttctcactgagtggggcctccctgcagaaactccaacaactccagctgggagctcagggacaaaaccttgatcttcctgggcctgaccccctagggggagaggttgccatagtctccatggaccagcagacttagtctttcctcttgctagctctgcaaaattcaggcagcccagatgagtcagtttccctccaccacagcacaccccctccaccaagggacagccaaaatgcttccttaaatggttcctggttcccatgccctcaactgtgtgagacccccaataggggtctccagacactttatacagaagcattcctcctgacattaggtcactgtcccttggagtcagaaatcccagaggaaggaggaggcacccatctttgctgttctccagctttctctgtgggcatctccaggtgcaggagtgacccagataaataggcctgaagtgaacccccagcaaaccactgtagccttacagaagaggaacatgcctattgaaagaaaaacaaataaaaggctacagcaacaatgtcaacaaaaaaagttcctacaatggccgggcatggtggctcacaactgtaatcccagcactttgggaggctgaggcaggtggatcatgaggtcaggagtttcagaccagcctggccaagatagtgaaaccccgtctctactaaaaatacaaaaattagccaggtgccatgctgggcacctgtaatcccagctactcgggaggctgaggcagtagaattgcttgaagccaggaggtggaggttgcagtgagctgagatcatgccactgcacaccagcgggggtgacagagcaagactccatcttgaaaaaaaaaaaagtccccacaaaaacttcagctaagagtcagcagcctcaaagatcaaaactggacaaactcatgaagataagaaagaatcaacacaacattgctgaacacacaaaagaccagagtgcttcctctctaaatgatcacaacacctctccagcaagggcacagatctgaacagagaaaagactgatgaattgacagaagtaggcttcagaaagtgggtaataacaaacttcaaggaggtaaagatgcatgtcctcactcaatgcaaagaagataagaaccatgataaaagattacatgagttgctaactggaataaccagtttagagagaaacataaatgatctgatggagctgaaaacacagcacaagaactttgtaaagtatacacaggtatcagtagccaaagctatcaagcagaagaaagaatatcagagcttgaagactatcttgctgaaataaggcaggcagacaagatgagagaaaaaagaataaaaaggaatgaacaaaacctttgagaactatgggactatgtaaaaagaccaaacctatgactgattggagttcccaaaagagatggggagaatgaaaccaagctggaaaacacacttcaggagatcatccaggagaaattccccaacctagaaagacagaccaacattcaaatttagaaaatacagagaacctcagtatgatacttcatgagaagatcaaccccaagacatataatcatcagattctccagggtcgaaatgaaggaagaaatgctaaggccagccagagagaaaagtcaggtcatctacaaagggaagtctatcagactaaaagcagatctctcagcagaaactctacaagcagaagagagtggggggccaatatttaacattctggaataaactaattttcaacccagaatttatatccaggcaaactaagcttcataagcaaaggagtaataaaatccttttcagacaagtaaatgctgaaagaattcatcaccacaaggcctgccttgctagaactcctgaaagaagcattaaatatggaaaaaaacaaacaaacaaacaaacacccataacagccactgcaaagacacactgaaatacaaagatcaatgacactgtgaacaatctgcatcaactagtgtgcaaaataaccagctagcatcatgatgatgggatcaacttcacacataacaatattagcgttaaacataaatgggttaaatggaccaattaaaagatatagactggccaattggatgaagattaaagatttattggtgtgctgtattcaagagactcgtttcacatgcaaagacacacatatgcccaaaataaaaaaaaaaaaaaaaaaaggaaaatttactaagcaaatgggaagcagaaaaaagcaggggtggcaattctagtttcctacaaaacaggctttaaaccaacaaagatcaaaaaaagcaaagaagggcattacataaggtagcaagacaaactgcagacaaaacccctcagacaccgagttaaagaaggaagggctttattcggccgggagcttcagcaagactcatgtctccaaaaaccgagctcccccagtgagcaattcctgtctcttttaagggcttacaactctaagggggtccatatgagagggtcatgatcaattgagcaagcagggggtacgtgactggggactgcatgcactggtaatcagaatggaacagaacaggacagggattttcacaatgcttttccatacaatgtctggaatctatacataacataaccaattaggttaggggtcaatctttaaccaggcccagggtgagacaccaggctgtctgcctgtggatttcatttctgcctttagtttttacttcttctttctttggaggcagaaattgggcaaaagacaatatgtggggttgctgccagagcccttagacatggaggccagcctttggaaaccccatctagttgttttgagagataggccactggccttggccagggccccacagcctgggttgaaactccaactgccattatttctctttctgacacatagagtgtaaagggttttgtcaagtcaggtatccccagggctggggccaacatcagtttttcttttaactcatgaaaagctcattgctgttggttataatagaagtagtttatccaatctacatttttattaagtgtcgtccaccaaaatattgtctcaaatcctgcagctatttgatttcaagctttaaattgatctggtattccccatgggactccaattacatctaaatagatgtgagagtcgaaagacccataaggggcttctctcactttatggtgtcttatttttcctccctcttgttgatgaaatgccagggtgaaagggatagccaattggactaaagtacaaattccactccagttatttggcagagtgcccagtaaaggtccatcacaataccaccacacatccatgccaggatgaacaaagggctgactgattgataagctcttgaaaattcttaagctcagtacatcccttcaggtttccaaggaatgctaagtttcctccctatcatgagagatgcaaagtgaacttagtgttgggagatggaagctggatggcccttgggggcagatccacagggtgccagacttagggatatagcagagagagcttggcatgacttattactccaggctatagaatgctggaaaacagctaccatacagcccatgcctgggcaactggaggaccaccttagtggaaaggggacaatcagggcctctggcctgccatgtgctcaagcataacaattgtctttgtttaatgtgtggatggaatatttgatccattccaaccaggcatttgcatcttggtatcctgtcttaattgccaaagtttgttttaagtctttaacttctatgatcctctagtaaaatgaatgtatgattttaggaaattacaaaaactggttggggcagtccatccttgctctttagtggtccacagaaagttggaccagctatggcataaaagctctacattgggggccaagaatcctggttgacattggagtctttatcaaaatttccccagattaaatggtcctaatttactaatgcccagtctgaggagagtcaggagggacagaggtacttttctgaagtagagagctgtctttgacttggcaattccccacagggtataacaacgcaagcattaaaggcaatggcttgaggcgaaattgacttggttatgttaataaccctagaaggtcagcaatagagcaaggaaaaaagaaagagtaatagaatagatgaaagagttaaatttttctcagctttagtttggtagagttttccgctgggactatggcccatgactctggagggggtggtgctttcttgactcgggtgtgatgagtccatcattttttcactgtacaaacagcagtcttggtggttaacagcacaaagtagggtccttcctaggctggctcgagtttcctttcttttcaccctttgataagaacgtgatcttcaggctggtgctggtttgccggaaattcttggagtggtacatgtgctaaaagacttttagttttgagggaagggaaagtggaagataaaccaagtatatgattcttaagaaactgaccttttttttaaattgacctttttgttttaaaagtccgtcagcagaggactttacagtccttggtgccttttactgagaaatttcctttagcatctattttcattagtttttagaccaaagaagccaaacaccatcttatagttgacaatgcttcctgtatgatttttataccagataagctaaatgtcacctttatattagtgtgttattaatgttaaacttagttttattaaaactttgtagacatgtttattcaatttttaatgtcagaccataaggtaagatttttatagactctttttaaccttttataatctttcttgaagagcaggttagtgctttaagaaaaatctgttgtgtttttactttaatgtccagttcacagaaaaactggatgatacccctttaactttagctaatatgttaacacacagaattttctttataattaacattttaaaacttgcttaaaccttcaaaacaaattttttttaacctttcaatgtaggtaaaaatttacattcttatgcctccttataatcattttaccaaaggtatattttagtttccttatacaccttgcacataaactgtttcttcaatagtactcaggaggcctaattacttttaaaatatacaacatttcttgcataatttcttttttataactttttttctctttcacgacttttgcagataattcttcgacatgcctcaactttctgacttattacaaacatttctttctttaaacaaccagttaatttgtttcaggacaataatttaccatataacattctttttacataaattctgccccccctttttttcccttttttttttttttaagatgacaaccattcttttcaaaaagcaaacttgctttatgtctgtggaccagactgtctaaggccacaagattaaaagttactataatacatgttacactattaacttttagcaaactttacttttgttgaaaaccttgtaaatttgagattccaactatcctttgctattaataggaccttgtttagtccaaattaacttaaaattggtatagatggctttttttttttttttcatttacccagtaggaaacatctatcatcctgtcctgaagggagttcctcctaggtctggttggacctttgtatggtaattaagatttagatcccctgttaggaaacctgctgggttaagtgaattttcagcggttaatgttaagtctttttttttttttttttttaactcaggatacttctgaactggtgaggtgtgctcacaatgaggtttcctctaaattatttttctactttcttctgtgagcaaagcagttgccactacagattgaatgcatttgggccatctttgggttactgggttaaggatttttgataggaaggctacaggttgtcaggggcctcagtgctttcggactacgcccttgtttacacttacaaggtggtattggagtgttgtagggtcatggagaagaccttcaattatcaattatatttgactttctgtctctctctctctttggctttccttttgcctttgtctcttcctctctctctgcctctctctttctctctctctcttcttgactccctctttgtctctctgtctcttcctctctgtcttttcctctctctctttgcttctttttctctctgtctctttcctctctctctctctgctggtctttccttgcctctgcaagctgcttatgctgctgttctctcaaccactgtggggtggggggggggtctaaaaccagctgtaaccaagtgtctatatacaggaactggtctgggtgtcctggcttacaggttaccttgtgccatacctttgtaacacgggacctgtccaggcttccttctgatagtcaacccacctctaatgccagtctatcttacacaaagttttaagttttcctgctgtcatagtactccatagtctcccttagatcctttcttgaaatttttcaacatagttcctggtggggtgggcttactttgtgcctgacccatgctttcttgagacaagacaccatgctcacaccacatgcataccacaaaacaaagaacgggttaaaagggcacacacatacttttacagtttacaccaaaccagaatcaaaaccaaaatcagagtatcaagaaatccaagccaggtcaaaaccaaaaccaaagtatcgagcaatccaaatcaagtcaaaaacaaaaaccaaagtgctggtacaggcacattgtgggtgatcaggccacacttccactcaaatggagtaggcaagttacaaagaccagtcttaccaagtttcagatgtctggactccaagtgccatttccttcccagtgttcagccactgcattgatcctccgtgggggcctgccttgcaccactctgacaaggcattccaccgaggcaaatgcctacccaggagcactctcaggatccacgtcactcaagctggccggagttccccatagggatgctccacagggcaggcctaagccacctaaggggctgcctcaacggtccatccattaatcacctcgcttcccagtcagggaaccaagaaatgtagcaggacaagccacagacaaaacccctcagacaccaagttaaagaaggaagggctttattcagctgggagcttcagcaagactcacgtctccaaaaaccaagctccccgagtgagcagttcctgtccttttaagggcttacaactgtaaggggttcagtgtgagagggtcatgatcaactgagcaagcagggggtatgtgactgggggctgaatgcaccattaatcagaatggaacagaacaagacagggattttcacaatgcttttccatacaatgtctggaatctatagataacataaccagttaggtcaggcgtcatactttaaccaggcccagggcacggcgctgggctgtctgcctgtagatttcatttctgccttttagtttttacttcttctttctttggaggcagaaattgggtataagacaatattaggggtggtctcttcccttaataattataaaggaatcaattcaacaagaagagctacctatcctaaatatataggcattcaatacaggtgcacacagattcatgaaacaagttcttggagacctacaaagagacttagacttccatacaataatacagggagacattaccaccccactatcaatattagatcaatgagaaagaaaattaataagaatattcaggacttaaacacagctctggatcaagtggacctgatagatatttacagaactctccaccccaaaacaacagaatatacattgttctcagtgccacatggaacttactctaaaattgattgtataattggaagtaaaacactcttcagaaaatgtaaaaggactcaaattatatgatactgtctctcagaccacagtgcaatcaaattaaaactcaagattaagaaactcactcaaaactacacaactacatgcgaattggacaacctgcttctgaatgacttctgggtaaataatgaaattaaggcagaaatcacgaagttctttaaagtcaatgagaacaaaaaaacaatgtaccagaatctctgggatgcagctacagcagtgttaagagggaaatttatagcactaaatgcttacattagaaagctagaaagatctcaaatcaacaccctaacattacaactaaaagaactagagaggcaaaagcaaataaatttaaaagctagcagaggataagaaatgactaagatcagagcaaaactgaggaagatagggagatagagacacaaaaaaccttcaaaagatcaatgaattcaggagctggatttttgttttgttttgttttgttttgctttgttttgttttgttttttgagacggagtctcacacttgttgcccgggctgcagtgcagtggcaagatcttggctcactgcaaccttggcctcctgggttcaaatgattctcctgcctcagcctcctgagtagctgggattacaggtatgcaccaccaagcttggctaatttttatatttttaggagagacggggtttcactctgttgggcaggctggtctcgaactcctgacttcagttgatctgcctctcaaaatgctgggattacaggcatgagccaccatggctggcccaggagctggctcttttgaagaaattaataaaatacatagaccactagctagactaataaagaataaaagagagaagaatcaaacccaataaaaaatgataaataggatatcaccagtgaccccacaaaagtataaactactaacagagaatactataaacacctctatgcaaataaactaaaaaatctagaagaaatggatcaatttctggacacataaaccctcccaagactaaaccaggaagaagtcaaatccttgaaaagaccaactaagttctgaaatttaggcagtaataaatagcctaccaaccaaaaaaacacacacaaaaagcccagaaccagatggactaatggttgaattctaccagaggtaaaaaaaggagctggtgaagcagcattgttgtctggggtaaatacccagggttcatcatctaatgctgagaaggttaatgacacagacacacacacttggagtgtgtttaaagagcagaaagtttaatagatgaaagaaagaagaaagagagggagagagagagctttctcatgcagagaaagtggggcacccaaggtttccaggatgcaattgacttttaaaagaggcttgaagagggggtgattgatttacatagggttcaaaagattggtttgaccgggtgtaccatttacataacctgcaaaaaaacttgccttcccaccccaatcttttattatgcaaatgtggcctctacctggctggatccatgacaactgcacacgaggggacaaagaaaaggaagggggaattgccatattgggtggacctggctttcagtacagctgcccacgttcatctatgcagggttctagcttgcttatctatgcttgtagcttgacttttcaggctgctttatgttagaaaagagatggtttttggctgatttctattaaagaaaaatttcactgagaacatttttacacttgctaagtgactaaaataatttcctaataactgctatattactggtaccatttcttctggaactattccaaagaattaaaaaggagagactctcctcccttctcgttttatgaggccagcatcaccctgatgccaaaacctggcagagacacaacaaaaaaagaaaacttcaggccaatatctctgaagaacattgatgtgaatatcctcaataaaatactggcaaaccaaatccagcagcacatcaaaaagcttatccactacaaactagtcggcctcatcactgggatgcaaaactcatttaacatacacaaatcaataaatgtaagctatcacataaacagaaccaatgacaaaaaccacatgattatctcaatagatgcagtaaaagtcttcagtaagggctgggcatgatggctcacgtctgtaatcctagcaatttgggaagccgaaatgggtggatcatgaggtcaggagttcgagaccagcctgaccaatatggtgaaaccccatctctactgagaatacaaacattagccaggggtggtggtgtgcacctgtaatcctggttacttgggaggctgaggcaggagaatcacttgaacccaggaggtggaggttgtggtgagctgagattgtgccactgcactttagcctgggtgacagagcaagactccctctcaaaaaaataaaataataatactaataataaagtcttcaataaaatttaacattccttggctgggcgcggtggctcacacctgtaatcccgtaatcccagcactttgggaggctggggcaggtggatcacgaggtcaggagtttgagaccagtctgatcaacatggtgaaaccccatctctactaaaaatacaaaaattagccaggcatggcggtgggggcctgtaatcccagctactctggaggctactctgaggctgatgcaagagaatcccttgaacccaaaaagcagaggttgcagtgggttgagaccatgccactgcattccagcctgggtaacagagtgagactctgtctcaaacaaacaaacaaaattcaacatcccttcatgttaacaactctcaataaactaagtattgaaaaatcatacctcaaaataataagagctatttatgacaaacccgcagccaatatcatactgaatgggcaaaacctggaagaattctggaaaatcagcactagacaaaatgccctctctcaccactcctattcaacgtagtattttaagttctgaccagaaaaatcaggtcaaagaaagaaataaagggtattcaaataggaagagaggaagtcacattgtctctgcagatgacatgatgctatatctagaaaatcccattgtctcagcccaaaagctccttaagctaataagcaacttcagcaaagtctctagatacaaaatcaatgtggaaaaatcacaagtaccaacaataaacaagcagattgtgaaatcatgcatgaactcccattcacaattgctacaaagaaaataaaatacctaggaatacagctaacaagggatgtgaaggacctcttcaaaaaggactacaaactactgctcaaagaaataagagaggacaaaaacaaatggaaaaaatttcatcctcatggataggaagaagcaatattatgaaaatggctgtacttcccaaagtaatttatacattcagtgctattcccatcaaactaccactgatgttcttcacagaactaggaaaaactactttaatattcatgtggaaccaaaaaagagcctgtatagccaagaaaattctaagtgaaaagaacaacgctagaggcatcatgctacttgacttcaaactatacaacaaggctatagtaaccaaagcagcatggtactggtaaaaagaaaaacagacacattgaccagtgaaacaaaatagagacctcagaaataagaccacacgtctacaaccatgtggtatttgacaaacctgatagaaacaagcaatggggaaaatattccctatttaataaatgatgctggaaaaaaataaagtcagaaaaactaaccttctctctttctggtcatattatctatatcttatttagtcatttttatttatttcaattgctttcaattttagtatttgctttggaaattacttttttaatatgtataacattttcttggagtctatttatggacatcaatgctatttttcatattttgatatacaaaataaaacatcaatgtggatgtgatggcacctgcctgtaattccagcattttgggaggctaaggtgggaggattactttagctcaggagttcgagaccagcctggtctacatagtgtgacctcacctctaaaaataacagtaataaattagctgagcatggtagcacatgagtggggtcccagatactcagaaggctgagatgagaaaactgcttgagcccagatggttgaggctgcagtgagctgcagtcatgccactgcattcctgcctggctgagagagaatctttcttaaaagaaagaaagaaaaagaaggccaaggtaggtggattacttgaggttaggagtttgagaccagcctggccaacatgacaaaaccctgtttctgctaaaaatacaaaaattagctgggcatggtggcatttgcctgtaacaccaggttctcggtaggctgaggcatgagaatcgcttgaactcgaaaggcagatgttgcagcgagtggagattgtgccataggactccagcctgggcagcagagcaacaccttgtctcagaaaaaaagaaaagaaagaaagaaagaaaaagaaaaccacagagaataaactataatttttttttaatgtttgtaaagctctaattgcatagcagatttctggaagtcagtttccagaatccaaggctaatccctaagcattttatacatttctttctgcattgattataaaattcaggtttcccaacagaaatggaaaaaaataaagcatgaataacaatgagatagcacacaattatgataatggcaatcatgaaaagaaaaatttcaaagaccgtcaatgaaaatttggattaaatagatctagaaatatgaaatggtagagtagctttggaaaatagtttagtggcttattataaagttgagtatacacttattatgttaccaagacatcccactgctaggtcattactaaagtaaactgaaaactaatgctgaaatgaaactttttatggatgtctattgctcactttatttgtaattgcaaaaagctagatgtaaactagatgcttttcaacaggtgaatgaataaacaaaccagtgcatacctacaatagaatcctagttgtcaataaaaaaaaaaactattgatcgacatcacagtatagatgagtcacaaatgcatttctttaattgaagaaagtaaaatccagtttacagattatataatccaagtatatggcattgtagaaaaataaaattataaggattgataataatcagtccaggcttgatggctcaagtgtataatctcagcactttgggaggctgaggtgagaggactgtttgagcccaggattttgagaacagactgggcaacatagaaagaccttcctacaaaagaagaagaataaaaagagaataatcactgattgccaaagaatagatgagggtagacttaactacaaataggaggcatcggataattttgggggcaatgaaacagttctgtgtggtactgtgaagatggctatgtgactctagacagttttcaaaacctatggaactgtacatcacaaagaataaattttcctctctgaaaattagaaaaaacaaggattgggggaaaattcagataaaatgcagggagtaaaaagaagagttcacccttactagaaatgtatcacctaaccctattgaagaaggttggaatgaaaggacttggtgtaaatcactttgaataacactattttgattaaatactgcaagactcaagaactgaacacaaacattgtgttctggtatgtattgcttgtctataagcatatagactagcaatttttaaaagcactctatatgttagtatgtatatatatatatatatatatacataaataaatataattagtgcctgcatctctctgaagttgaaaaaaaagagaattctagaatggagttgagaatattttgataaatgcatgtatcataacatatctattgagagagacagaaagagagagatgtgttcatacaggagtcaatattaatatgtacctttccaaactctgtttgctgagaggttgcagaagcagtgacaccccaatattaatgggcacacctagctctcatatcatggtttctaagtactattcttcaacaaaaaaagcaagactacttgtaataatagacaattctagcactggagtggaaaatccaagttaaggtagagtattgttaagctaaaaagtttaaagtgctttatgaacaacagaagcagccatgtcagagaaagtcaacctgaaagacttcccaggagcccaagctggaaaaatgtgaaaaacacaataaacattattagcattggattaacacccagagaattaaaaaaaaatccatgaatccataaagatagagaaaaatacaaataagaaaaaaagaaggccagtcgccgtggttcatgcctgtaatctcagcactttgggaggctaaggagggtggatcacctgaggttgggagttcaagaccagcctgaccaacttgaataaaccccgtctctaccaaaaatgcaaaattagccgggcgtggtggtgtatgcctgtaatcccacctacttgggagtctgaggcaggagaatcatttgaacctgggaggtggaggttgcagtgagctgagatcacgacattaaactccagcctggacaacaagaatgaaattccatctcaaaaagagaaagagagaaagagaaagagaaagaaagaaagaaagaaagaaagaaagaaagaaagaaagaaagaaagaaagcagtagaaaaaagaaaaaaattttctttagaaaattccaagtatactaatcaatgtagaagataatgcaaaatagaaaatcaccactaagacaccacagtaataattactgtagacaagatgtacttaaaaatgcaaacattgtggataaaatttaaaggagaaacagtgtttctgttagccccaaagtatctgcctcaaatatttataaatagccccaaagtaatagccccaaagtatctacctccaaatatttataaatactatttcctctcaatttctttataagacttatgactaaggaaaaattataacacagtattgtgagatatatgtgtagatgtaaaatatatgaatagcacaaacaatagaaggaagtaattgtaactcttcaacagcaaggttttcatattttacatttattaaaatagtacagtataaactctaggtagattgtgatatgttacaaatgcatatagttatccctggagaaaccactaagaaatgtaaggaggtgtcacttaaatgctattaaaggaatttaattatataccaaaaagtatttgtacaagaatgtttatagagcttttagtcataatagcttaaagcagggaacagcctaaatatccatcgctagaaatatagatgaacaaattatatctcattcatacaagagaataccacccagccatagaaaaaaatgaactactaaatcacacaacctggatatatctcataaacctgccagataagacaagcttgaaataaaataatacgtattgtatgatgtcaagcaaaatgaaccaatgattaaaaagaaaaacacctctggtagagaataaaatcatctggaaaaaagcatgaggaaattatctgataattttttaaaaatccattattctgtggagtcactcatgctaaatgtgatataaactaaaaatgtaaggaaataggtgatcctaaagcagttcgggttttgttttcttctgtaaacagcagattttaacacaaggagttcctttctactgtaattctttttaaaaataataacctgaagtccttgtttttactttacaaaacccacagttctgctatttcacagtgggatttgagactaaataagtatacttttgatggtaactgatgctatcaatgtctaaagtttgggtctgtctctcaaaattgggaagatgaccaaaaaggagaaattattaaatcaattatagcctaaagctgccttcttttctgtttaatttttgtcaataggttctctgtacatagcaaactgaaacctaacttgatatgtaaatagactgtaacccactcttgtaccaactactgtgtttttggcaataaaaggacatcagctgtttaaaccatgttcgagtaaggcaaatctcgagctgtaatcaatctggctgtttctgtatctcacccccattttctgtatgtcactttgctttttctgtccataaatctttttccaccatgtggctatgctgcagtctctctgagcctactctggctccacaggctgcccaatttgcaaatcattctttgcccatttaaactctttaaatttaatttttctacagtattttcattttaaaagttttccattttattctatgatgaaaaataaataatctgttgttggcatttgattttctaaacttatccatcacctacaaatataaagtattctttgtctttttaaaatccttctgcaatttctttctttctttttctttctttttttctgagacaaggtcttactctatcacccaggctggagtgcagtggtgtatccaaacatggctcactgcagcttgaccttccaggctgaagtgatccttctgcttctgcatctgccacctgagtagctggggttacaggcatgcaccaccatgtctggctaatttttaaatttttattcatgaagacagattcttactatgttggctgaacttgaactcgagctcacgttattctcccatgtcagcctcccaaaatgctaggattacaggtgtgagccactgtgcacttctgcaaattcttgacaggattattcccaatgataaacagtactatattggcacaaatgtaaaaggaatgtaggctggctgcagtggctcacgctagtaatcccagaaccctgggaggccgaggcaggcagattacttgaggtcaggagtttgagatcagcctggccaacatggtgaaacctgtctttactaaaaatacaaaaatgagtcaggtgtgatggcaagcacctgaaatcccagctacttgaaaggctgtggcaggagaattaattgaacatgggaggaggatgttacactgagccaaaattacactactgcactccggcctgggtgacagagtgagaccccatctcaaaagaagttaaatagattaataaaactaaaataaaaggaatctggcctctatcgtagaagtgtcactctccaggatttcaagggtctagggcagctactttagtagtgtcatctatggaggtggatgggctttggagtctgacagagttgatcctgagtctcagcccagccacttagtagctgtgtgtctttggacaagattcttgatgtgaaagagttctataaaccacatatgcaaaataaaaaaaaaaaaagcagaatgacactgatttcaaaaatggtagcaatttctagttttttctgtatccatgcccattgccaggtgcttttaaagctgttcccatcaagatccaggatgttttccaaaccctagattttgctggccttattcactcagggcagtagaaacctgtgaacatgacaatgtaacagtttgaggcctaggctcatgtggggaaaagcaagagagatcagattgtcactgtgtctgtgtagaaagaaatagacatgggagactccattttgttatgtactaagaaaaattcttctgccttgagagtctgtgaccttacccccaaccccgtgctctctgaaacatgtgctgtgtcaaactcagggttaaatggattaagggcggtgcaagatgtgctttgttaaacagatgcttggagtcatcaccactccctaatctcaagtacccagggacacaaacactgcggaaggccgcagggacctctgcctaggaaagccaggtattgtccaaggtttctccccatgtgatagtctgaaatatggcctcgtgggaagggaaagacctgaccatcccccagcccgacacccgtaaagggtctgtgctgaggaggattagtacaagaggaaggcacgcctcttgcagttgagacaagaggaaggcatctgtctcctgcccgtccctgggcaatggaatgtctcggtataaaacccgattgtacattccatctactgagatagggaaaaaccaccttagggctggaggtgggacatgcgggcagcaatactgctttgtaaagcattgagatgtttatgtgtatgcatatctaaaagcacagcacttaatcctttaccttgtctatgatgcaaagacctttgttcacgtgtttgtctgctgaccctctccccacaattgtcttgtgaccctgacacatccccctctcggagaaacacccacgaatgatcaataaatactaagggaactcagaggctggcgggatcctccatatgctgaacactggttccccgggtccccttatttctttctctatactttgtctctgtgtctttttctttcctaagtctctcattccaccttacgagaaacacccacaggtgtggaggggcaacccaccccttcagctcaaaaggtcttgaatgcttctgtttttctttcagaatgctaccatttccatgaaaaatggccgatgttagcaagctggaggataagataccatggggaggagaagcaaggtgcccctgttgacagccccagaagcagaagctcatccccagaagcacagctgcctattcaacaaacagctgaagatacatgtctggaggagctcagctgagacaaaaagaacagcctcactgagcccagcctaaatagctgaccatctcaattatgggcaaataagttttgaatgatttgttatgctgcaatagctaattaatacatgcacccagtgcagacaggatgccaggattcattgacaagttgattactagttctcttctaacagtgggcaccctataggtactgatttttccccctgatttgaagttggatgccaagtaagagaatgctgagtaatgcagaaatatatatggatatgtatgcatgtaattggtgcctatactcacacagtcccccataccacaggagaaaacagataaccacggcctgacattagggccaaggacaaatagaaaagtaagtttgcctttaatctgttttcttcatatctaaacattggaggtcaagactgtgcacaggtttgaagacatagagatttcttctcctgtggccttatcatcctttgttcaccttctgatctctggaagaaaggtggaaaatgggtggccagcagtggtctacctgtggttgtttttttcttgctgtcctctgatttttctatggctactatctgttcctccctcagagctgaagagaaatgttggtagggaaaggctcttttttcagctttggcagaaaagttttttcaggcccttcgctcccgaggtcagagctgcacttcaatgtggcagctactggccatgtgtggcgactgagtgcctggaatgtggctggtctaaactgtgatatgctggaaaggtaaaatacagagttagtttcaaagatgaagttccaaaaaatatctacacttcatttataatttacattttgcttacatattaaaatgataatattttggatatactggtttaattaaattgctacaataaataccgcattttttgtttgtttttctttttaaagtttggctactagaaaatttaaaattcacatgtagctcacattttatttcagaggattgccttctttttaaaatctcaggcaatctgatggaaaaaacagaagtcagggaggtcataaaatcagaaatttttagataatttttattatattcttttcatttgtgtataaccatataatacattatttacgaaagaatatgaccttatacaaaaggttaaatgcaaataccctctggggttggcctggcttacttagctcagggaagaagccctgcctgaaaaggctgcagcctagactgtcactctttacttttttttgggggggggggcgggggacagactgtctctctgtcaaccaggctggagtgcagtggtgcgatctcggctcactgcaacctctgcctcccgagttcaagtgattctcgtgcctcagcctccggagtagctgggattacaggcgcccgccaccacgcctggctaatttttatttttagtagagacgaggttttgccatgttgtccaggctggtctccaactcctgacctctggtgatccacccgcttgggcttccctcccaaagtgctgggattgcaggcgcgagccaccgcgcggcctatcagtcttcattctgtccagcatctgatcacatcttttgtcactcaggatctgaggaggcggggatttaagaattatccaatcagggactctgggctaggaaccgtccaatcaggcatgcagctggagcggaaaaggcggcatccgagatgtggcggggccgttgtttctggttgcagccgcagttcccggtctcgccttcactgctgtgtgtcctcagcctctgtggccctgtaacctgcggcattggaagatccacagctaacatgccaggtgcccctggcagcctagaaatggtgagagtgccgggtccgacatcccgagaaggggaaggggctgattggaaccggtgggaagtggctgtggcgggactccggcctccccgcagtcagctccacaatctgcgcctggagttctttcccatctcggcctcagtctccttcagccataagatggcgaatgcgctgactgcgggaccctgggcgacctgtctcctccatgcgctgtgactgtgccctggcctggagccctctctgggccgctctgcacccgcatggccgcgtctctccgagattgtgcagggaccacgggaggggcgtcaggggagaatcctgactccggatgcgggttcatgaatgggaagagctttggtccagtgaggtttccagtccctcttttcttctgttaaaaatttatggcggtcaccactaaagtaataaataatttaatcaaagtgattcaaaaattgtagagcacccagctatggtttgtagtttatggtctatggaagggatttgacggaaagatttttttaaggtgcacaatgaagaaaaccaaattcagtaattggttatgtacagttacgtagtttctcagtttgtacaatcaagatggaaatttcccgtttatataatcagaggttaattgtagtttatagttggttaagcctgagttttgtttcccccaatgtataatttacaaaaaaaaaaatgcacttgaattagatttttttttttctttttttgagacggagttttgctcttgttgcccaggctggagtgcaatagcgcgatctcctctcggtgcaacctccgcctcccgggttcaagcgattctcctacctcagcttcctgagtagctgggattacaggcatgtgccaccacgccgggctaattttgtatttttagtagagacgggggtttctccattttggtcaggctggtctcgaactcccgacctcaggtgatccgtcctcctcggcctcctaaagtgctgggtttacaggtgtgagccgctgcgctcggccgaattagattttttaaaaagtagatatcagggactagagccacctcagtctaattgcctgccacttaattattcttaattattttcacactcctcggaggactgatttttttttttttcccttgcattttttacaggtatcccaaggagagtattatgtgtactcccaaacccccattcctgcagcctatctctggcttgcagtaaaatataaaatttccagttcattgttaccttcccaaatgtcaattttttcctctctgattcacattactatttgtcctttttttttttttttgagatggagtctcgctctgttgcccaacctggagtgtggtgtcctgatcttggctcaccacaacctccgccttccgggttcaagcaattctcctgcctcaacctcctgagtagctgggactacaggcatgtgccaccatgcctggctactttttgtatttttagtagagacagagtttcactatgttggccaggctggtctcgaactcctgaccttgtgatctgctcgcctcagcttcccaaagtgctgggattacaggcgtgagtcaccgtgcccagcctactatttgtcctttagtgtacatttttgataccatgttttaattattttttaacaaagcattggatggcacttttcctaatatttgttttctgtttgtaaatatttcctatgagaagaaagcaaaaaattatcccctgacactgcgttgtaaaaagtctttgtactgtttttttttttttttttcctcctaggcccacagattttatcagaatgtttcgggggtaaatgttttcctttggaaactttatggagtgatgtgttttcagccattcttcagatttttttcctggtcctgggtttcagtactgtctgggaattaactaaaataccccccatggctatgtctgctagagtgtctagtgaatatcagctcctggtcattttctcccatgggacaatctgaggtatggagtgtagcctttcagggaagcaggcggatgccctggaattgagaggaatctcctggcatactcttcctttgaaaagctaacccttgagacattaagattgtcttcacccaacccagcttccaattattgaagacccaacccagcttccatttcttgctggtcagccaatcagttgctggtattgcgggaaaaagcattgaaataatttctgccccctgcattctctaagggggcaaaacaatagggaaagaaatataatgaaaaaatagtgaaagaaaaatagtgcgaatctttgaaatcaaaaataatatcccaaaagaaaaaaaaacagtgatccagtgagatggtgtaagaacttgcaaagtaaaatacatctggggcactcactggggcttaattcagagtctcctgagaaggggttattgggcacttaagtgagcagaatggagtgggagaatctctcaagtgattggatggcctgattgaaacatgagtcagacacatctgtaccttgaaaagatttggtcgcttattttgacctcagttttttaactgtgaattgcattttgttagtagggattgaaagaaagataagaaaatatttaccaagggcaaaaaagagatggatttcagaataaaattaatatttaattatatattccatttgttaatttttttttttttttttgagaccaagtctcactctgtcgcccagactggagtgcagtggcgcaatctctgctcactgcaacctccatctcccaggttcaagtgattcttctgcctcagcctcctgactagctgggactacaggcgcccgccaccacacccggctaattttttgtatttttaatagagatggggtttcaccgtgttagccaggatggtctcgatctcctgaccttatgatccacccgcctcagcctcccaaagtgctggtattacaggtgtgagccactgcgcccggcaaaaatttgtatttacccttttctcagaatgagtttaggaattttctctggtttgttttttatggctgggtgtttttaaacaatttcaaggcttaacttttagaatgctaccagggaaaaaaataggaaaaatctctcttccattttggcttcagaaaatgcacacatttccacaagaaaatatggtaggtaattggtgagttatgtagattcatgaaaacatcagttcctctttttgcagggtaaatttgtaaccgtgaatatctctattctatatcctgttatattgctgtctgagtttcatgctaaattttatgagctgaaactttgtaccctctagaagtgttcccatatgactgtttactacatgatttttaatggaaatagtaaaataatatttattgtctgaaaggaatagatacttttgcttatcttactgagacataaaatgtaagcaccttaaaattttcttcccttacatgtacactgtgttagagtaattctgctgaatttttcaaacacttactttcaaaaaccacatgaataactctgacatgaaaattaaagcctgagcctagtgactctaagctaaggctaatactgagcctgcaaaaggaagttattaaaggaccacttagttttttctggggagtcttctctgcagatattccagcctgctcaccccagccatggaagacgcctttatcctgagagaaactacatagccttggaaagttggggacccacagccagatgcagttaaggttaagatgaaaggggattgggagggtcttactgaagatgaaattgttattgttttgtggtagtttctagactttgtaaagtaaaacaaagttagatttatgttggaaaaagaattgaattccaaaagagtattgcaagaggacgaagtaccaactctgagatcttcaaggattgcaaagtttaggcagacaagggccttgtttcatatggaagagcaaacagtattaggaggtgggaggggatggcaaatggagggtgaaagaatgagattttagatcagagaatgttttaccctgaagtcatcatgttcttaggaactacataaaatggggttgtatgttgactcagactgagggtagcttaaagttcagaaagctgttgaaaggaaataaacttaagtaatgtttgattaagaagtattctaggttgaccactgaaaacaaattcagctgatttatttattttttttaatgagaaaaaagagacagtgtgcagagtctgtgtctggctatgtgacaggtaagaaaagagcaccatctaagtcataatgggaagggtatttctttctgacttttcctggattgtatcttttctaataaactgataaatgtaactaggttgttttcctgagttctgtgagtagctgtataatattattgaacttgaagaaggttatgagagtccccagtttttaaacggtagctcagaaacagatgggtctatggggtttgtgactggcatctgcagtaagaacaatgttgtgagactgagccctgaatcagggtctgtgctgactctgggtggtgtcagaattcaaatgttaggcaatgagttggtgttggagaattgcttggtgtttaccaagctctacaaatttggttccagataaaagatatcacagaggcctggtctggaatggatctctgggtgtctgggaatgggaggctctgcttttctctacacaggccatcacactgcccattatcctgtgatttcagatctcctcccggggtgagagaggataaaaacttagagtaaaaaagttctgataacagaccccctttttccactgctgccaccacaggattcccaccttcttacaaacatatccactagacattgacttgtccacacccctcgtaggaataggtaccacccccagcaatttcactacggcatttttgatcctagcgtttcttgccaaaaactcacaaaagtgtctacaagtctcctggcatatcccaacccccagacactgaatctgcagcagcaacctgttttctccaccaacctggggttctggacaacctgttcataatctcatctgcctgcatggacccagaaattaatcagagtagagtcacacctgggccactatctgtagcacaaaccagtccttccacctgcattgccctctccccaacccataaagttcttttatgttttgtttttgtttttgtttttgagacagtttcattcttgttgcccaggctagagtgcagtggcacgatctcggctcactgcaacctcagccttctggtttcaagcaattctcctgcctcagcctcctgagaagctgggactacaggtggctgccaccacgccccgctaatttttgtatttttagtagagacagagtttcaccgtgttggccaggatggtctcaaactcctgatctcgtgatccgcccacctcagcctctcaaagtgctgggattacaggcgtgagccactgtgcccagccagcgagttttttgttttaacttttatttttgattcaggggtacatgtgcaggtttgttacataggtgaaattgtgtcggggggttggtgtgcagattattttgtcattgaggtattaagcacagcaccacacaggtattatttttctgatcctctttgtcctccatcctccacccttaactagaactcagtgtctgttgttcccctctttgtgtccatgtgttattatttagctcttactaataaatgagaacatgcatttggttttctctttctgcattagttttgtaaggataatggtctccagctccatccatgttgctgcaaatgacataatcttgttcactttttatggcaacacagtattccatgatgtttatgtaccatattttgttttcattaaatcttttattttatttatttttggagactgggtctcactctgtcacccaggctggagtatagtggcatgatctcagcttactgcagcctcaacctcctgggctcaagcaattcttctacctcagcccccaagtagctgggactacaggtgtgtgccaccaagcccagctaatttttcttgtattttttgttgagatggggtttttccatgttgtttaggcctgtcttgaactcctgagctcaggcaattcacctgcctcggcctcccagagtgctggaactacaggcatgagccaccacaccttatcataccatattttctttatttagtttaccattgataggcatttaggttgattccatgtctttgctattgtgaatagtgccgcaatgaacatgtatgtgcaggtgtctttatgacagaataatttatattttattgggtatatacccaattatgaggttgttgggtcaaatggtaattctctttttagttctgtgaggaattgccacactgcttttcacaatggttgaactaatttacactcatgccagcagcacatagccgtttctctgaaaccttgccagcatgttattttttgactttgtaataacagccattttgactggtgtgagatggaatctggttgtggttttttctttgcatttctctagtgatgagtatttttttcatatgcttgttagccacatatatatcttattttgaaaaacatttgttcatgttttttgtctacctttttttttataattgagacgaagtctcactctgtcgcccaggctaaagtgcagtggcataatctcagcaaacggcaatcttcacctcctgggttcaagcgattctcctgcctcagcctcctgagtggatggaattacagggacttgccaccatgccctgctaatttttgtatttttagtagagacaaggtttaaccttgttggccaggctggtctcaaactcctgacctcaagtgctctttcctccttggcctcccaaggtgctgggattacaggcgtgagccaccactcctagccttttgtctatttttttttttttttttgagacagtttcgctcttgtttcccaggctggagtgcaatggtgtgatctcggctcactgcaacctccgcctcctgggttcaagagattctcctgcctcagcctcctgagtagctggaattataggtgtccaccaccacacgtggctaattttttgtatttttagtaaagacagggtttcatcatgttggccaggctgatctcaaactcctgacctcaggtgatccacctgtcttggcctctgagagtgctgggattacaggcataagccacggagcccagccaccttttgtctaccttttaaggaggtcgtttgtttgtttcttgtaaacttaagttttttatggattctggatattagacctttgtcaaaagcatagtttggaaatattttattttattctataggttttgtgtttactctgttgatggtttccattgctgtgaagaagatatttagtttaattaggtcccatttgtcaattgttgctgttgccattacttttggtattttcatcataaaatctttgttagttcccatgtctagaatggtattttctaggttatcttgaagggttttttataattttaagttttacatttaaggctttaattcatcttgagttgatttttgtatatgatgtaaggaaggggtccagtttcaattttctacacagtgctaggtgtttatcccagcaccatttattaaatagggaattcttcccacattcctcttgttagttttgtcaaagatcagttggttataggcgtgtggcattatttctgggctctctattctgttgcattggtctgtgagtctgtttcttgtaccagtattatgcggctttggttacagtagccctattgtatagtttgaagtcaggtaatgtaacgcctccagctttgttctttttgcttaggattgccttggctactcgggctcttttttccttccatatgaattttaacatagttttctatagttctgttaagaatgtttttggtagtttgataagaatagcattaaatcatttctttttttgggcattatggccattttaatcattttgatcttttctacctatgagcatagaatagttttccatttatttgtgttatctcggactttttttttttttttctttttctttttttttttttttttgagtccgagtctcactctgtcacccaggatggagtgcaatggcacagtcttagctcaccacaacctctgcctcctgggttcaagctattctcctgcctcagcctcctgaatagctgggattacaggtgcctaccaccatgcccaggtaatttttgtgtttttagtagagatggagttttactgtgttggccaggctggtttcgatctcctgacctcaaatgacccacccggctcggcttcccaaagtgctgagattacaggcatgagctaccgtgcctggccgtctgtgactctttaagcagtgttttgtgattcttgacatagagatctttcacttctctggttaggtgtactcctagatatttgtgtgtgtgtgtgtgtgtgtgtgtgtgtgtgtgtcagttgtgaaggggattgtgtttttgatttggcttttggcttgcatgttgttaatatacagagattctgccaatttttatacatttattttgtattctgaaattttgctgaagtgatttgtcagtttaaagagcttttctgcagagactgtagggttttctagatacagaattatgtcatctgcaaacagggatagtttgacttcctttcttcctgtttgaatgcctttcattttatctcttgtctgattgctctggccaggacttccaattctcttaaataggagcggtgagagaaggtatgccagttttctttcttttttttttttttttttgagacagagtcgctctgtcgcccaggctggagtgcagtggtgcaatcttctccgctcactgcaagctccgcctcccgtgttcacgccattctcctgcctcagcctcccgagtagctgggactacaggcgactacaggcgcgcaccactacgcccggctgattttttgtatttttactggagacggggtttcaccgtgttagccaggatggtctcgatctcctgacctcgtgatccgcccgtctcggcctcccaaagtgctaggattacaggcgtgagccaccgcgcccagtcgatatgccagttttcaaagataaacgctttcagcttgtatccattcagtatgtttactttgggcttgtcatagataactcattattttgaagtgtgtactttgaatgcctagtttgttgaggattttaaacatgaaggctgataaattttattgaaatctttttctgcatctattgagataatttttttggtttttatctttaattctctttatgtgatgaataacatttattaattgttgcatgttgaaccaaccttgcatctcagggataaagcctacttgatcatagtggagtagcttcttgatgtgctgctggatttggtttgccagcattttgttgaggattttttcatcaatgtttatcaggaatattggcctgaagttttctattttttgtttcatctctgccaggttttggcatcagaatgttgctgtttctatataacgagctaaggaggagtcccttcttctcaattttggaatagttttagtagaatggttcaggcccttcgttttacgtctggttgaattcagctgtaaatttgtctaatcctgggctttattttggatggtaggctatttattacttattcaattttggaatttgttattggtctattcaggaatttagtttcttttttgttcagtctttggagaatgtatttgtctagaaatttatgtatttctattaggttttttagtttgtgtgcagacaggtgttcatagtagacttcaatagttatttgtatttttatggggtcagtgataatttctcttttgtcattaactgtttatttgaatcttctctttattcttcattaatctagctatttaccttatttatttatttcaaagatttatctcggatttcttgttcttttgtatagtttttcatatctaaatcttcagttctgatcttatttatttattttttttgtctgctgatagcttaggagttgctttgctcttgcttctctcgttcttttatttatgatgttaggttgttaaattgagatgtttttgatgtgaccatttaatgctattaatttccctgttaacactgccttagctgtgttgcagagattctggtatgttgtatctttgtttcaaaaacttttaaatttccaccttaattttattatttacccaaaagtcattcaagtgcaggttaatttccatgtgattgtatggtttcaagtggttttctatgtattgaattgtaattttgtcaagctgtggtctttgtgattggtatggtttgaggatttttgaatttgctggggattgttttatttctgattgtatagtcaatttgagagtatgtgccatgtggtgatgagaagaatgtatattatgatgtttttagatggagagttctgtagatgtctactaggactctggtcaagtgctgaatttaggtttaaatatttttgtttattttctgcctcaataatctgtctaatagtatctgtgaggtcttttagccttctactattgtgtcagaatctacatctcttcttaggtctctaagaacttgttttatttatgtgtaccaatacattttttataacacctttttctcttctgttttttttttttcccataagcatattttcaagtgcacacagtgtgcccaaggatactccttagattttgagtgtctgctgaaattcagatgtccaagaatttaagaatatatcaaaagacctggcttttgtaggagaaaatacaaattagaaataagaggatttattctcctataggaaaataagaaaatatattttgcttatcttttttaaagcatttagattttatgtagatatttttctctacttttttgaaatatatataaatcatattaaaacaaaatgaacctcttattattctttgtgactcaggattctttttatttagattcattgctttgtttttgctttggtgtagatatatatatatatatatatggtctttaaaggagacaaagatttgtttagattaaagctcatattaagaacacgtaaggctgggcgcagtggctcatgcctataatcccagcactttgggaggccgaggcgggcggatcacctgaggtcaggaatttgagaccagtctgaccaacatggagaaactccgtctctactaaaaatacaaaaaattagctcggcatggttgtgcatgcctgtaatctcagctactcgggaggctgaggccagagaattgcttgaacccaggaggtggaggttgcagtgagccgagatcaccccatcgcactctggcctgggtaacaaaagcgaaactccatctcaaaaaaaaaaaaaaaaaaaaaacacaaaacattgagcacaaagataggatgaaatttagcaatacagaatgataaaagctgaaagatactgagtacatttctttgacagaaaaccgattatacaaggtattagcatagttacgtgtagtgtttgtagacaacctgcattcatataaattaaacagcattttcttcagtagtatgaatataaggccaaaacatttactttgactgaatactcattaaatagtcattttaatattgctgttcatacttttgaaacatataaagtatatatacatataaaaaatatagtgttttaactgaattatggctacagacaatttaaaaaattcttacatgccttatatctaatacattagttatttatacttagatatttatttctaatatccaaataaaatttactaccaaattgctaaagtagatattagtctgacatgtttattaacttatctaatagggataactataggtaagcataattacagtgtcttcttttttgagacagagtttcgctcttgtcaccccggctggagtgcaatggcatggtctcggctcactacatcctccacctcctgggctcaggtgattctcctgcctcagcctccctagtagctgggattacagacacccaccaccatgcctggctaatttttgtatttttagtagagacggggtttcaccgtgttgtgcaggctggtctcaaactcctgagcccaggaagtttgcccaccttggccttccaaagtgctgggattacaggcatgagccaccatgcccagcctatttatagcgtctttcatttcactatgttggaatgctgctattacaggagaaataaacacagatgatgtggccaccgcaaaaccataatagctctttagttagctatgtggcaagcttaaatacattccactatatgaacaaagtcagattatacatcttcatcaaaagtgctggtggaaattgtgagatgtatttcaatatataaccccccattcaatggctaggagatgagagagcagcagagatggaagagaaatcttataaaattctgctgagaatatatcccttttcttcataatgctcatgtttctcatgctgagagtagctgtgcactttggttgtttagagagaaattccttttaagagaatattttctggctgacttgatcaatcttatatctaaattgagtttttgtttgtttgtttgtttttgagatagaatctcactctgtcacccaggctggagtgcagtggcgcaatctcgactcactacaacttccacttcccaggttcaagtgattttcctgcctcagcctcccgagtagctgggactacaggcttgtgccaccaagcctggctaattttttatatttttagtagagatggagtttcaccgtgttagccaggatggtctcgatctcctgacctcatgatccacctgccttggcctcttaaagtgctgggattacaggcgtgagccaccatgcccggcctaaactgagtttttacttaaaatgcatttaacttttttttttctctaagcataatcttgctcagactgagagctgtttttctgtccaatgctttgggtgtctgcactattaaatattccctgttgtctgtgaatgaggtgggctgtcacagtgagaaattttggagctatctgtacttggacttaatgttggaaatccagcagtagtttttccatgtcacattgtaaataaaaactgaggctgaattactgttccaatgtccattaatgtaaaggtgcagttctccccaggaggcctgcaggctctcctcctgcagctcaggcttccctctctggggtgacactggagtgctgctgtggcagttgtggtttatgtaagatgtgagctttcagatgtgagccctgtgcagtgtgctctgcctcaatggcagatggtagtggtcaagagaggacactagctaacggagagggcaagcaggagagatgtagccaagtgctcagggagtagagagccattgctttaaagtgtaaatagccaaaaagatagcactctattcaaccatttttgtaggagattgagagcctaccttcagcaggcacctggattcaagttgcaaaattacctcctttcatgaagatgtgaaaagtttattttgtcattgaacataactgattagcctgcatggctagccttcccaattaccaggtgaatttaggatgaactgtgtatgacatggtgctatacatttttctacttgtgaactaattacggttactgtctttctatcttttcagtctcttaagcagattgactgtgatgcatgtcacattcaggtttaattgtgtaataaaacagttttatgtctgttctattgtggagtttctctggggctgaagaaaatttatcttttaattatgtttcacaaaaactgtctagaattatcagacatgatatataaatataaggtgccacccaagctttactctagaggaaactttccctctcaggctatcagtcaattcacaattgtgctgcaaagtgcatactgtcccctaaatatgcaggcagaattgcttctctgccaatttggtatctttaatcctccacagtaacttttagagaagctagatcagaattctacaaacttcacagggcagcaatcaaccattttatgtttttcagtgactcttgtatcttccgaactgaaactgattcacagactatggggcccagaaacccaatcagagtaacatatgtgcattgagtagacatgtacacttgggaatctgtacttcctttttcttcatcttgctaaaatgcccacaaatgtgcagggaaaacctgctgctatcccatccattcagaacctaaaactgcaacttcaaattctgaatccaggtcttcagatttgagaaaaaagaaaaactttctttctgagagatgcaagtccttttggttgtccaacttatagagacattaaaatgagagcagaattatgtttctctttttgttttttgaactatgtattcatcttttgaagctgtttgctattgccacaagtagctatatattaataatgcacactggacactataacttgtaccgtaaaacttaatggtgtatatccaatcaataatcaatgttattcctgtaaataataaaaatttctgacaaacaactttgtatcaacccactctctgtccatcttttttagcctttacaaatcaacttgtaatcacactgctaatcaagtgtatgttgcgggcaacttgaatatttgctcccaggttacagtcctcaagcttggcccaaataaactgtcaacttaaatctatattttctcagctttttcgttttaggtagacatatttagaatgtgccagagtagtgtctatgatgagatctctcctttgattgtactctgtttgctgtaacacccaaggaggcagagtctggttgatcccacctggaatctgcacataagatctggcctctgcctaagatttacaagacagggccaaactttgaattgagagtatgcagaaaaccagcagaagacattttctgtattgtgagatgtcaacgtagagatcttaaatcttttctttgagactgtggctctgtgagattttcagatcttttccagtgacctgttacaggtatgtgagagactccaggtataaataaaatctgatgacagaatctgtaagtataaacaggcatcttaggagtgagagatcaaggccacagagtaaccagagccatgactacaactatacctacctgtaaaatgtgatactggagtagagtattgttatttctcttacccaagagctagcaaatcagaagaggtgatctagattctggagcttaaccagggcggttccattttctatttataaccagcctgagtctcttctgcctggctcatcattgggtcattagcccagagtcactggaaaccctctcacaatcacctaggcatctttgagacatttgaggatgtccagagcagaactgtgtcaagctgacaaaagtggttaattctgcttctgtctcagtataagagaaatgagtcatcctgtgtttgttcctcccctcatacaagagatacctttagttggtacccagacaagagtttctccagtttcttggtacttgggtgaaaaacaagaaggaggtcctgagactcaaacaggtaaactaatagcttccatttcatgtggccattaaaaaaatagatgagggagtcatggtccctaccacccaggaacttatagtctagactagcaactgggtacatggttgaattaaacgtcatcatatcattggtacaataaacagatgtgtgcagaaacgcttgggctttatttggactactttatattcttctgacttctgatgtcatcacttgaagggatgtttatgtttatttctatttattttaccttggtagaatacatatgtatattttaataaaattaccctaggaaccataaaagactggtttaaattgcttattagtatatgtcataaaattgggcactgtctaaaaaaatatttaaattacacagattctgggatttaagtgcatcttaggtaagcttaggaaaaacaaaactggaagcactcccagtagcatagagaacagaattctacatagggtccactccctggccaagttctgtttagatccactgtttttggaggccttatttaggtcaggtcccaccctggagtcttacctcacagaactggataaaagagattagagttttggctggggaatcctgcttcatttctagagcgggagtgcagtggcgcaatctcagctcactgcaacctccacctcctgagttcaagtgattctcctgcctcagcctccagaatagcgtgccaccatgcctggctaatttttgtactattattagagatggggtttcaccatgttggccaggctggtcttgagctcctgacctcagatgatccacccacctcagcctcccaaagtgctgggattacaggagtgagctactgcgcctggccttttaagtatctttatgcagctgatgtgcaccagtgatcacatttaatctggcacctgcctttctttcttagattttctttgcatatatctatctttggaaaatgaagtctctcatctttgtttacaggccagaaaaactgggaaaaacacaggttcccccacttgctgaatgtttgacaaaagattcttttttgggccaaaaacaggcatcactggtgagcttgtcagaaattcagaaactcagactttattctagatcttctaaaataaatatgcataacaagatctccagttaattgtacacattaaaatttgagaggtgtcttctaactcagcatgtctttttgatctgaaaaatatacaagacttattctgtatgatgtaaatatagcacaaaaaatgtacatgtttgttatcatgccattagttttatactttattatccagaaaggtatcttatctacactggtgttgcggatcttatgccattcttttttctcagaatttgagactacattagataatatttctgtgttgaaaattattttattggatatgttcggtcatccctataagttagaatctgttctctttattctctcatttcaccttgagtcaaattaaaaatttctgcccatggccacttgggaaatgtatatgtgtctttcgttgtgtttttcagggaccattgacatttagagatgtgaccatagaattctctctggaggagtggcaatgcctggacacggttcagcagaatttatatagggatgtgatgttagagaactacagaaacctggtcttcctgggtgaggataattttaattaagcaattcctattatattctataggtttaatttctcttttctgtagaatgtgttttggtgatttatgcttactataaatgagtttcacatccctgttttctggaaacagggatttataagtgtagaaaggaattttttttttttttttttttgagaaggagtttcactcttgttgcctaggctggagtgcagtggtgcaatctcagctcactgcaacctccacctcccaggttcatgcaattctcctgcctcagcctcccaagtagctgggactataggcatgcgacaccacacccggctaatttttttgtatttgtagtagagatggggtttcaccatgttggccaggatggtcttgatctgttggccttgtgatccacccgccttggcctcccaaagtgctgggattacaggcgtgagccaccgtgccaggccaaaaggaattttttaaagatgtttcatttttacctgaacttttcacatttctgagcagatctgtatttttcactctagattagtggaaattgctgaaattgagtggcataaaatacagttgccacaccttaaaatctcattgccaccaacaatttttgattcagtagtaccaggtagtaaaattaagggcctgtacaaattgaaaatactttctaaatatttagaaatgtatgttataaattagtattgggggatcaatttactagaatattctattacattctctttaatgagcatattatttgggtaatatgaccaatatttatgttatttatttttaataaaacaggtatggctgtctttaagccagacttgataacttgtctgaagcaagggaaagagccttggaatatgaagagacatgagatggtaactaaacccccaggtatgtgagagtgaatacaacagacaacacagataagaggtccagaggtcaaggagaaagccagttctcaaaatgtgacctgagaagctgtgctccaaaggaagtagtttctgggaagactgagattttttaaattttgctctcacgtagaggcatcttctgtcttatgctttaaaattctctaaggattctgttttcattttggtgatctcccttcaagtttacaatgagagccaaagtcgtgttcatggcgtataagggactgcacagtctgactgcttttccattgttattggggacacacaaatatctgtatagttttgagaaactatgttaaaagaacctggctcttttacctcacacttgctctgtcttttaccgtgtgatatgtccagttccttttcgccttccactgtgatcataagcttcctgacctgagacactcaccagaaacagatacaggcacacacttcttgtacagtctgctgaactgtgagccaaataaaccttttttctttataaattatctactctcagatatttttctgtatgcaaaatattatagtctataatgttacctacattttgttttcttaatcttttacatgaattttctattttttattattattgaaaatggggtctcagtgtctgcaacagttatgttgctatatatttcttgcttcacctttgtcaatatttatgtattttggagccctgttgttatacctacctgtacatataaatataataattatagattcctggtaaattgacccatattactattatataatatcaatttttgtctcatactagtacttgacttaaagcatattgtgtccaatataattatgactgtctcacccaattgtggctactatttgcatgaaatataaagtttttaaattctgttacttacagactatttgactctgctaaaattggtctcttgtaggaacatattgcatgcttttttccttaagccactcagtcatcttctttctttttcttttaattaattaattaattaatgaaatagggtctcactctgtcagccaggctggtttgcaatggtgtgatcatggcagtgagctgcagcctcagcctctcaaactcagataatcctctagtttcaacctcttaagtagctggattacaggcacatggcattaaacctagctagtttttttgttttgttttgttttgttttttagagacagggttttgccttgttgctcaggctggtctcacactcctggagtcaggtagtcagcccaccttggcctcccaaagtcctggaattacatttctttttattaagtagtttaaaaaatttatatttaaaatgatttcttaaagaaataaagttttgcactgggcacagtgacttatgcctgtaattccagcactttgggagaccaaagcgggcagatcacgaggtcaggagttcaagactagcctggccaacatagagaaaccccgtctctactgaaaatacaaaaattagccaggcatggtggcacacatcagtagccccagctactcaggaggctgaggcaggagaatcagttgaacccggaggtgcaggttgtggtgagctgagatcatgccactgtgcaccagcctgggcaacagagtgagactccatctcaaaaaaaaaaaaagaaaagaaaagaaataaagttacataccagtttcattgttctgttttatgtttttttttttaacatgttttttctcatttcttgtttaactattttttgtttaattttgtagtggcacgctttgcttattttattttgttttgcatagtttctataaaatttttgtagttatcttgaaaaacggacattatgtaaaatatcttaagattaaatcagtatgttttaatctcataacaatttcaatggaacaaaaaactatatttttatattttccagtttgttattaatattataaattatttcatattgtgtattcagatttatgcagatttacattttgtttttatattctatagaagaattttaagggtttctgcactattattatagtaagaaattttatatatgtctgtatatttacatttaatagaaagctttttttatgttatctagaatcattttattttcaacatgaaagactcattttagcatttctttttttatatgtgtctgtatatttacatttaatagaaagctatatatttatatatggatttttgatactgtctagcatcattttattttcaatataaaagactcattttagcatttcttttttctatatgtgtctgtataattatatttaatagaaagctatatatttatatatgggtttttgatgctgtctagcattttatttttcaacataaaagactaattttagcatttctcttgttatatatgcagagtctcactatgtttttgtgctgatcttgaactcctggtctgaagttatctgactgccttggcctcctaaaggtgtaggattacaagcatgagccactgtgcgtgtccacaatgtagcattttttttttttttttttttttttttagctgtgctagtggtgatgaacacccttacctttcattttggaaagtctttattttttactgtttttaaagtaaaataatttctgatcaagtgttatggattaagaatatttttttttcagccggacgcggtggcttatgcctgtaatcccagcacttcgggaggccaaggtgggtggatcacctggggtatggagtttgagactagcctgaccaacatggagaaaccttgtctctactaaaaatacaaaagtagccgggcatggtggtgcatgcctgtagtcccaggtactcgggaggctgaagcaggagaatcgcttgaacctgggaggtggaggttgtggtgagccgagatcccaccattgcactccagcctgggcaacaagagcaaaactccatcaaaaaaaaaaaaaagcatatttttttcttttattacatcaaaatttggaaagctctgtgttttttttttttttttttttttttgtctttaagtaacctgtatactactttatttttatttatttattttttcttaagttattggggtacaagtggtgtttggttacatgagtaagttctttagttctttaatggtgatttgtgggagttttatgcactcatcacccgagctgtatacactgcaccctatttgtagtcttttatccctcgtttccctcccgctcttcccctcaagtccccaaagtccactgtatcattcttatgcctttgcatcctcatagcttagctcctacatatcagtgagaacataagatgtttggttttccatttctgagttacttcacttagaatgatagtctccaatctcatccatgttgctgtgaatgccattaatttattccattttatggctgagtagtgttccatcatatatataatctcacagtttctttatccactcattggttaataggcaatgggcatttgggttggttccatgattttgctattgtgaatcatgctgctataaacatgtgtgcaagtatctttttcatgtaatgacttcttttcttctgggtagatacccagtagtgggactgctgggtcaaatggtagtatgacttttagttctttaggaatctccacactgttctccatagaggttgtgctagtttacatttccatcagcagtgtagaagtgttccctgatcaccacatacacaccaacatctactgtttttttgattttttttttattatggccatttttgcaggagtaaggtggtatcgtattgtggttttgatttgcatttccctgattattagtgatgttgagcattttttcatgttttttggccatttgtatatcttctgttgaaaattgtctattcatgtccttagctcagttttgatgggattgttttttttcttgctgatttgtttgagtgcattgtagattccagatattagttctttgtcaggtgtatagattgtgaagattttctcctactctgtgggttgtctgttcactctgctgtttcttttgccttgcaaaagctctttagtttcattaagttcccgttttgacactattccacaagatacagagagaaccctccctaatttatctttgtttttattgcatttgcttttgggttcttgtatatgaaatccttggctaagccaatgtctgaaagggtttttccaatgttatcatctagaatttttatagtttcaggtcttagatttaagtccttaatccatcttgagttgatttttgtataaagtaaaagatgaggatccagttttattctatgtgtggctagccaattatcccagcaccatttgttgaaaagagtatccctggccgggtgcggtggctcatgcctgtaatcccagccctttgggaggctgacataggtggatcacgaggtcaggagttcgagaccaggctgaccaaggtggtgaaaccccatctctactaaaaatacaaaaattagccaggtgcagtggtgggtgcctgtaatcccagctactcgggaggctgaggcaggagaattgcttgaatccaggaggcagaggttgtggtgagctgagatcgtaccactgcactctagcctgatcaacagagcaaaactccatctcagaaaaaaaagaaaagagtatcctttacccactttatgtttttgtttgctttgtcaaagttcagttggctgtaagtatttgggtttatttctgggttctctattcttttccattggtttatgtgcctatttttgtaccagtaccatgctgttttcatgactggctttatagtatagtttgaagtcaggtaatgtaatggcttcagatttgttctttttgctttgtcttgctttggctatgcaggctttttttttttgttccacatgaattttagaatcattttttctaattctgtgaagaatgatgatgctgttttgatgggaactgcattgagtttgtagattgcttttggcagtatagtcattttcacaatattgattctactcatcgatgagcatgggctgtgtttccatttgtttgtgtcatctgtggtttcttttagcagtgtttcatagttttccttgtagagatcttttacctccttggttaggcatattcctaagtttttggggtttttttttttcacggctattgtaaaaggggttgagttattgatttgactctctgcttggtcgctgttggtgtatagaagagctactgatttgtatacattaattttgtatctgaaagctttgctgaattattttatcatttctaggagctttcttgaaaagtctagggttttcaaagtgaacaatcatatcatcagcaaacagtgacagttttacttcctctttaccaatttcgatgccctatcttttttctgcttgctctggctaagacttctagtactgtgttgaagaagcatggcgagagtgggcatccttgtcttgttgcagttctcagagggaatgctttcaacttctcattcagtattatgttggctctgggtttgtcatagatggcttttattacattgatgtatgtcccttgtatgccaattttgctaagagttttaatcataaagggatgttggattttgttgaatactttttctgcatctattgagatgatcatatgatttttgtttttattcctttctatgtggtgtatcacatttattgacttgcatttgttaaaccatccctgcatcactggtatgaaacctatttgatcatggattctctttttgatatgttactggattcagttagctactattttaaggattttagcatctattttcatcagggacatcagtctgtggttttcttttttggttaatgcccttttctaattttggtattagggtgatgctggcttcatagaataaattaggaagggctccctctttctctgtcttgtggaatagtgtcaatagcattgctaccaattctttgaatgtctggtagaattctgctaaattctgtctggtcctagactttttttgtggatgattttaaaattaccatttcagtctcgctgcttgttattggtctgttcagggtatctaattcttcctgatttaagctgggtgggttgcatttttccagaaatttacccatttcttttaggttttctagttagtgcacttaaaggtgttcatagtagccttcaatgatcttttgtatttctgtggtgtcagatgtaatatctcctgtttcctttcttattgaggttatttggattttctttttttcttggttaatcttgcttatggtctgtcaattgtatttatctttttaaagagccaggtttttgtttcatttatcttttggtttttgtctgttggtttgtttcaatttcatttcattctgctctgattttgattattttttttcttctcctgggtttgcgtttggttttttcttgtttctctagttctttgaggtgtgaatttagagtgtctgtgttctttcagactttttgatgtaggtgtttggggctatgaactttcctcttagcaccgcctttgctgtatcctagaggttttaataagttgtgtcacttttgttgttgagtttgaagaatttttttaatttccattttgatttcatatttgaccccatgattattcaggagcaggttttttaatttacatgtatttgcatggttttgaaggttccttttggagttgaattccacttttattccactgtggtctgagagagtgcttgatataatttcagttctcttaaatttattgaggttcattttggggcctatcatatggtctatttggagaaagtttcatgtgctgttgaatagaatgtgtattctgcagttgttggatggaatgttctgtatatatttgttaagtccatttgctccaaggtatagtttaaatccattgtttatttgttgactttctgtcttgatgacctgtctagtgctgtcagtagagtattgaagtcctcactattattgtgttggtgtctatctcatttattaggtctactagtaattgttttataaatttgggagctccagtgttaggtgcatgtatgtttaggactgtgatatgttcctgttgtacaagaccttttaccattgtataatgtccctctttgttttttttaattgctgttgctttaaagtatattttgtcatatgtaagaatagcccttataaacctcttgtttagcatgatattgtggggttctctggcttaggtgaatagcaagccattttcatgaattacctcatgccattaggggaagaggtatcctcatttttttcaattttttatagtgatctgtgttcctgtttctctcattcagtgttatttaatttatttgaaattttaaaaattaatttattaatcttcattgttttatggttgctttctaaaaattttatactttttttgattgggccatgttgtcctaatattctatatacattgtaatcgttgattaaaatttgtacatcaaaaaagctacctgttggaatcttcataatgtagccttgtcctggaatagtctgaaaccaattgtcttggctagagattctgggagtctgtcaaacatgttcttagaatgtgtcttgtctgaaattgtgtgtgtgtgtgtgtgtgtgtgtgtgtgtgtgtgtttagataaagaacgttattcaggtttcttctcaatagtaatcacttgctacatctattttttgtgtgtgtggtactatattcagtgctgctgtaacatctaactttggtctcagcagactcaagctgtcattttaaagtatgccaccatttctttcagcactttatgtcatcagagacaaaaaccagaaaggcccctggaagccagaaataaatatatatgtgctactggtttttttgtttgtttgtttttttgagacagagtttcactctttttgcccaggctggagtgcgatggcatgatctcggctcacctcaacctccgcctcccaggttcaagcaattctcctgcctcaacctccctagtagctgggatttcaggcgtgtgccaccacgcccagctaattttctatttttagtagagatggggtttctccatgttggtcacgctggtctcgaactcccgacctcaggtgatccgcccacctcggcctcccaaagtgctgggattacaggcatgagccactgcgcctggccatgccactgttttatttgtctttaaacaataaaccaggagttggcaatttccttttttttttgagacagggtctcactctgtcacatgggctggagtgcactagcataatctcatctcactgcaatctctactccccaagttcaagtgattgcctcagcctcccaagtagttgggactacagacgtgtgccaccacatctggctaatttttgaatttttagtagagatgaagtttttccattttgaccaggctggtcttgaactcttgatctcaggtaatccacttgccttggcctccaaaagtgctgggattacaggcatgaactgctattcccagtcagcaatttacttctaaagagcctatgctatttttggtagcaggaagagctgcattgggaaactgtaaccgacttccctttccttctgtgtggctctttgcattgtgcttacttggggtacttaacttacatataaattttccacaaatgtatttggtcagtatgtttttgttacatttatatgtctatgaagaaattagggcctgtcttattttgctgtgccatcttatgtggtttgcataattttataggttagatttgtaaagtatattcatctgagtctagcaagtggaataatttgttatttttatttcttctagttatgcgttctcattttacacaagacctttggccagatcagagcacaaaagattctttccaagaagtaatactgagaacatatgcaagatgtggacataagaatttacgattaagaaaagattgtaaaagtgccaatgagggtaagatgcacaaagaaggttataataaacttaaccaatgcaggacagctacccagagaaaaatatttcagtgtaacaaacatatgaaagtctttcataaatattcaaatagaaataaggttagacacactaaaaagaaaactttcaaatgtataaaatgtagcaaatcatttttcatgctttcatgcttaattcgacataagagaattcatattagacagaatatctacaaatgtgaagaacgtggcaaagcctttaaatcgttctcaacccttactaaacataagataattcatactgaagacaaaccttacaaatataagaaatgtggcaatgcctttaaattttcttcaacgttcactaaacataagagaattcatactggagagacacctttcagatgtgaagaatgtggcaaagcttttaaccagtcctcaaatcttactgaccataagagaattcatactggagagaaaacctacaaatgtgaagaatgtggcaaagcttttaaggggtcctcaaattttaatgcacataaggtaattcatactgcagagaaaccctacaaatgtgaagattgtggcaaaacttttaaccatttctcagcccttagaaaacataagataattcatactggaaagaaaccctacaagcgtgaagaatgtggcaaagcttttagccagtcctcaacccttagaaaacatgagataattcatactggagagaaaccctacaaatgtgaagaatgtggtaaagcttttaagtggtcttcaaaacttactgtacataaggtagttcatactggagagaaaccctacaaatgtgaagaatgtggcaaagcttttagccagttctcaacccttaaaaaacataagataattcatactggaaagaaaccctacaaatgtgaagaatgtggcaaagcttttaacagttcctcaacccttatgaaacataagataattcatactggggagaaaccatacaaatgtgaagaatgtggcaaagcttttaggcaatcctcacaccttactagacataaagcaattcatactggagagaaaccctacaaatgtgaagaatgtggcaaagcttttaaccatttctcagaccttagaagacataagataattcatactggaaagaaaccctacaaatgtgaagaatgtgggaaagcttttagccagtcctcaacccttagaaaccatcagataattcatactggagagaaaccctacaaatgtgaagaatgtggtaaagcttttaagtggtcatcaaaacttactgtacataaggtaattcatactggagagaaaccctgcaaatgtgaagaatgtggcaaagcttttaagcatttctcagccctcagaaaacataaggtaattcatactagggagaaattgtacaaatgtgaagaatgtggcaaagcttttaacaattcctcaatccttgctaaacataagataattcatactgggaagaaaccgtacaaatgtgaagaatgtggcaaagcttttaggcaatcctcacaccttactagacataaagcaattcatactggagagaaaccttacaaatgtgaagaatgtggcaaagcttttagccatttctcagcccttagaagacataagataattcatactggaaagaaaccgtacaaatgtgaagaatgtggcaaagcttttagccatttctcagcccttagaagacataagataattcatactggagagaaaccctacaaatgtgaagaatgtggtaaagcttttaagtggtcatcaaaacttactgtacataaggtaattcatactgcagagaaaccctgcaaatgtgaagaatgtggcaaatcttttaagcatttctcagcccttagaaaacataaggtaattcatactagggagaaattgtacaaatgtgaagaatgtgtcaaagcttttaacagtttctcagcccttatgaaacataaggtaattcatactggagagaaaccctacaagtgtgaagaatgtggtaaagcttttaagtggtcctcaaagcttactgtacataaggtaattcatactggagagaaaccctgcaaatgtgaagaatgtggcaaagcttttaagcatttctcagcccttagaaaacataaggtaattcatactggaaagaaaccctacaaatgtgaagaatgtggcaaagcttttagccaatcctcatcccttagaaaacatgagataattcatagtggagagaaaccatacaaatgtgaagaatgtggtaaagcttttaagtggttgtcaaaacttactgtacataaggtaattcatactgcagagaaaccctgtaaatgtgaagaatgtggcaaagcttttaagcatttctcagcccttagaaaacataagataattcatactggaaagaaaccctacaaatgtgaagaatgtggcaaagcttttaatgattcctcaacccttatgaagcataagataattcatactgggaagaaaccatacaaatgtgcagaatgtggcaaagcttttaagcaatcctcacatcttactagacataaagcaattcatactggggagaaaccctacaaatgcgaagaatgtggcaaagattttaacaattcctcaacccttaagaaacataagctaattcatactagggagaaattgtacaaatgtgaagaatgtgtcaaagcttttaacaatttctcagcccttatgaaacataagataattcatactggggagaaaccctacaaatgtgaagaatgtggtaaagcttttaagtggtcctcaaaacttactgaacataaggtaattcatactggagagaaaccctgcaaatgtgaagaatgtgacaaagcttttaagcatttctcagcccttagaaaacataaggtaattcatactggaaagaaaccctaccaatgtgacgaatgtggcaaagcttttaacaattcctcaacccttacgaaacataagataattcatactggggagaaaccctacaaatgtgaagaatgtggcaaagcctttagtcagtcctcaatccttactaaacataagataattcattctgtagagaaaccctacaaatgtgaagaatgtggcaaagcctttaaccagtcctcacaccttactagacacaaaacaattcatactggagagaaaccctacaaatgtgaagaatgtggcaaagcttttattcagtgctcataccttattagacataaaacaattcataccagagagaaacctacaaatgtgaagaaagtaccaaagcttttaagcaatcctcacaccttactagacaaaacaattcatactggagagaaaccctacaaatgtgaagaatgtgccaaagctttttaaccatccttcaacccttactaaacatatgataattcacactggggagaaaccttagaaatgtgaataatgtggcagagctttcaaccattttataaaccttaatacacataggataatttatactagagacagaccctgcatatgtgaagaatgtggcaaagcttttaaccagtcctcaagccttactagacataattcatactggagagaaaccctacaaatgtaaagaatgtggcaaaactttttttttttatactttaagttctagggtacatgtgcacaatgtgcaggtttgttacataggtatacatgtggcatgttggtttgctgcacccatcaactcgtcatttacattaggtatttctcctaatgccatccctcccgcagccccccaccccctgacaggcctgggtgtgtgatgttccccaccctgtgtccaagcgttctcattgttcaattcgcacctatgagtgagaacatgtggtgtttggttttctgtttttatgatagtttgctgagaatgatggtttccagcttcatccatgtccttccaaaggacacgaacttatccttttttatggctgcatagtattccatggcgtatatgtggaatgtggcaaaacttttaaccaatcctcaaaccttactagacagaaaacaattcatactggagataaacccatcaaatgtgaagaatgtggcaaagcctttgaccagtcctcacagcttaaatacgcataagataattgatactgaaggaaaactctacaaatatcataaatgtggcatagcttctaaccattgctcagcttttactcaaaatgagagaattcctaaagaagataaactccacaaatgtgaataatatggcaaagcttttgaccggtcctcaaatcttactgaacataagataattcatgctagagacaaacactacaaatgtgaagaatgggcaaagcttttaaccagttctcaaaccttactcaaaataatttatagtggagaggaacgctacaaattcaaaggatttggcaaaacttttaagtgtttctcaaaacttactgaacacaagataattcatattagagagatactttacaaatgtgaagaatgtggcaaagcttctaacgggttctcaaatcttactgaatgtgagataatttatattagagagaaaccctacaaatgtgaagaatgtggcaaagcttctaacgggttctcaaatcttactgaatgtgagataatttatattagagagaaaccctacaaatgtgaagaatgtggcaaagcttttaactggtccttaaaccttactgaacataagataattaatactaaaggaaaccctaaacatataaaaaatgtgacaaagcttttaactggttttgagaccttactcaaaataagatagtttatactgaagacaaactctataaatgtgaagaatgtgacaatgcttttaatcaattctcagactttactagacgtaagaaaattcgtactggagaaaaaccctacaaatgtgaagaaagtgggaacacttttagccagtcctcaactcttactaaacaagataattcaatgggagagaaaccctacaaatgtgaataatgttataaccattctatttatgtgtttacatgtttagtgttgaaataatgtttatttttcatattgatattacaatttggagacatttttcactcacaatttttgaagtgggtgaatttcagtctacagtttttatttttagtcacttcactgtaggcaactctggtaattttctctggaaaaattttggagacgaagttgtaatggctttcaggttaaaacatttcctgttattttgcatgcaaacttgtttacggtgttcaaacagtggccaatctttaggtcataaacaacacctacccttttaatgtctttcataccattgcaattagcaccaaaaacttctgctgtcttaaacttaaaataaaagccctaatgtacgttggctcctcccatgcacggtactgagttcagaacatgctgttaaatgtcagagttcctatggttatgactgaaaaattaaatgacaagacagcacaaaactatatacttttgataccatttagccaagttaatgacaaagacagagaatatttgaaaaaattgatatccttctataatgttttaaatatatatttttcaacttgacagataaagcatgtattctgtaaaacatgatgttttgaagtatatatatacattgtcaaacttaattttaggtaattaatgctgtacctcacatagttaacatttttgtggtgagagcacatgacattgtcctagcattattcaaaaatacattattattaactatagacaccatgctgtacaacaagtcttttgaatatattacttttatctaactataattatgtattattctttgacaaacatctttctaaagccctcttttagataccttggcatctggtggttacaattttattctgtgcttcagtgaatttaagttttatatcattcatgtttaggtgaaatcataaaattttctttctgttcctggcttattaaaagataaatagataaattttatatatatactactttgtcagtatttaatcattagatgttgaactgttgattctatattttggctattatgaagagtgttgcagacaacatagaaatacaaatatttctcattctgatttcatttgtttttaaatatatatatatcctatagtgaaattgctgcattatatggcagttttattttaaatttattgagaaatctctatttcggttttcataatggctgttctcatttacactcagactagcagtgtgcaagcattccttttacttcacatctttaccaacacttttttttctttttaataagagtcattctaatatgagtgactttttatctcatagattttttggcttgcctttctctgataataagtgtaattgagcattttaaaatatctcttggccatatgtatgtctttttaaaatatttaagccttttgctcatttttcatagttatttgtttttttattgtatagtcactttcttacatgatcttgatattcaccccttgtcacaagtatggtttgcaaaaatgttctcccatttgtcttgttgattatatcagattctgtacagcaactttttaatatgaagtaatctgactcatctatttttcctttagttccctgggattttgaggttaaattaaaaaaaattactgttgaaaccaatgttacggggctttcagtctatattttttgtagtagtttcagagtttcaggccttacatttaagtattaatatattttcagttgatttatatatgtggagtaagatgagagactcattgctctgcatgtggctatagttttctcaacactatttattgaagatactgtcattttcctaagaaattgtcacctatataaaaaatcagttagctttaaatacatggatatatttcctgtctcttgtgctccattggcctgtgtgactcattttgttcaagtaccatactgttttcattactatagctttgcagtatatttcaaagtcaggtaggatgatacctttagcctttcttttttgcttgaatgcttctgctattcagggtcttttgtcatatcatataaattttagggtttttgtttgtttttgttttattttagacagagtttcactcttgtcacccaggctggagtgcgatcgtgcaatctcagctcactgcaacctctgccctcaggtttaagtgattctcctgcctcagccttctgagtagctgggattacaggcacacaccaccatgctgggctaatttttttttgttgttgttgttgttttaaaaatgtgtgggtttttttatagtatttattgatcattcttgggtgtttctcggagagggggatttggcagggtcataggacaatagtggagggaaggtcagcagataaacatgtgaacaagggtctctggttttcctaggcagaggaccctgtggccttctgcagtgtttgtgtccctgggtagttgagattagggagtggtgatgactcttaaggagcatgctgccttcaagcatctgtttaacaaagcacatcttgcaccgcccttaatccatttaaccctgagtggacacagcacatgtttcagagagcacggggttgggggtaagcttatagattaacagcatcccaaggcagaagaacttttcccagtacaaaacaaaatggagtctcccatgtctacctctttccacacagacacagcaacaatccgatctctctctcttttccccacatttcccccttttctattcgacaaaaccaccatcatcatcatggcccattctcaatgagctgttgggtacacctcccagacggggtggcggccgggcagaggggctcctcacttcccagacggggtggccgccgggcggaggggctcctggcttctcagacggggcggccggtgggcggaggggctcctcgcttctcagacggggcggctgggcagagacgctcctcagttcccagacggggtcgtggctgggtagaggcactcctcacatcccagacggggcggcggggcagaggtgctccccatatctcagacgatgggcagccgggcagagatgctcctcacttcctaggcgggatggcggccgggaagaggcattcctcacttcccagactgggcggccaggcagaggggctcctcacatcccagacgatgggcggccaggcagagacgctcctcacttcccagacggggtggcagccaagcagaggctgcaatctcggcactttgggaggccaaggcaggtggctgggaggtggaggttgtagcgagctgagatcacgccactgcactccaacctgggcaacattgagcactgagtgaacaagactccgtctgcaatcctggcacctcgggaggccgaggctggcagatcactcacggttaggagctggagaccagcccggccaacacggcgaaaccctatctccaccaaaaaaatatgaaaaccagtcaggcgtggcggcgcgcgcctgcagtcccaggcactcggcaggctgaggcaggagaatcaggcagggtggttgcagtgagccgagatggcggcagtacagtccagcctcggcttggcatcagagggagaccgtggaaaggggagacgagggagagggagaacgtagaaaggaaaagggagagggagagggagagagctaatttttgtatttttagttgagatggggtttcactgtgttggccaggctggtcttgaccccgcctctgcctcccaaagtgctgggattataggtgtgagccactgttcccaggcttgagcacacttttattagtttttctctgtttagtccttttgtttgtttctattttaataagaattttaatttctacctgaaattactaatttgagcccaaagtatctgagatgtcagagtgtcaggaggttgtgacaatgcgtgcccaaggttgttggggcacatgttggttttatacattttagggagacaggagacatccatcactatatgtaagatgcacattgttcagaaaaggacaacgcgaagtggggcgggagcttccaggtcataggtagataaagggcaaatggttgcaatttcctctgagcttctgattagccttttactgggttttttccaggtctgtctttcctaagcctccaagtttatctggagtcaagagaaacttgactccatgtttgtagaattttaatctattttggccaattttatgtctactttataacatataacaacaggtaatttaaccaaaacccttatggttttcttgcacagctataagctacacatgtattcttagcaaggtaaaaacaacagaaaccatgatgattacaataaccacccttctgtgcatgagtagcccttcagctgggacatcacaccccactgtagagtttctgaatcctacacctgaaggcagtcaaaagttggaaaattgtcttgcacacatagatctggtccacaggtaggttggtgactcccacaccatgattcagcacacccacgaaatggtgaatttactaagaagacaaagtttacaggaagaatagaggctctgatgcagtccactgttgagattgtgactcatgtacttagactcaacattcaggaggtgttgactcttatacctaaaactgggacatgtatggaattgttaatctcaccgtggatcttctgtagatgttattgtgacatatgcctctcccatgacatatgcctctcccagcacctgagtgatttgactctcttgggtcccagctgacagatgggattgtggcatatcactggacacagcacctaggtgatgtgacactattctcctgccttggcactacctacctggggctttgtgacacgtctgtgctcataactaaggggatgtgattctcttctcttgcctgatgtctgctcacgtgggagacaatgacatatcgctgggcccaatgccaaagtgacattgcttttttaccttgaccctcttctcagaaaacatcgtgacgcattgttggggcacagtcaacgtgacgtgagtctcctgcatgaaccctgaccacagagaccatcgtgacataatctctggaagctcaactattggaaatgattaccttgttatacctgctctttgcccataggagagaatgtgacatatctctgggcccaggacttagttgatgtaactctgctctcctgcctgggctatgcctacagaagaaagagtgacttatcactgggcccagcacacaggtgatgtgattctactgccttgatccttgtccataggaatcatcattacatacttgtgggctcttctgctggatgatgtgtgtctccttttctgtccacagaggagattgtgacatatcacttgacccagcacctacatgatgtgcctctcatgccttggcttttcccactgggctaattgtgacatatagctgggcacagcttctaggtaatttaactcttctcttcctgagtcctacccacagggggcattgtgatgtgtctctaagcacttcacctaggtaatatgactcttttccttgaccctcccctaatacggtattgtgacatatttctggaccaccacctaggtgatgtcactcttttctcctaccttttactggaagtgaattcatacgggtatgagtgcaggaacctcgattcttgccttagaagaaacaactcgactgaggggcataaagcaggagagaccgaagcaagttttaaagcagcagtaaaagttcattagaaagctacagaacagaaacaaaaggaaggaaagtacacttggaagagggccaagtgggtgacttaaaaggcaagtgcacggtgtgactttttgacttgggattttgtatgttgacatacttccggggtcttgcattacttccccctacttgcccaactcttgagatcttattgggaagctgctgatcactagttgtaggtgatccactagttgcccacttgagaacagaggagatactggagtgaactgtggccccctcttcatccttggggttcaagtcttaccatgcacacctagcttttgatctctgttttatgggtctcttgcacctgtggccttggcctggcctacatcattgactccattgacctctagtgactctagttaagagcattctagcaacaaaataagtatttctcttctcagatttccacttcccatgttcttttagtatatgtgaagcccatttttcagctaactgcccaaagggggctagacttccctccccactctttttatatatgaccttgaaggtcttgatgcatattgagaagggcaggaaagtaattagaaaaatggaggctacagaagaaagtgaacggaagtgagaggaatactcaagggaagacttcatatgcttaacaaaacagcagcccttggattcaagaggataataatgttcatccaaagcaggtggacaaactgcttcaaaagtcactgagaaactcattcctggggcataacagaaatgagaagtatatgataagtcataagctgtcagagccagagttggaattagtgtggattagtggaattagattagaggcttatgtctggaccctatctacaaggaaattgtgacatatctgcgttcatcagcaaaaagtagtgactctacttttttctactgggaagattgtaacctattactgggcgcagaaaacaggtgacatgcttctcctgcctgggccttggccacaaaaagttttgggatataacatggctcagcacccaggtgatgcaactctgccacctgtgccctgctttcaggtggggattgtaacatattcctggctaagcatcaaggtgatgtgactctcctgcctggtctttgccctccgaaaatattgtgacatattcctgggccagtgccaaggtgacgtaactctcttactcattccctacacacaggagggatgttgatatatatatttgctgagatcactgatatgatgatgacatttatacaaaaaaaaagttataccactccctcacatacagtataaagccgtcaagtggtacaaactcatcacaggacacagcacaaatatgagattgttttttgtgtgtgcaacctgccaacctttaaagtcacccacacacatggacagggtccaattttgaagtcctgaaactcacaagtagacacagttcaaagttaaaattgtgactgtcatatgtgaacacctggccactgttgggttagtgactgtttaataaacccagcttataggcaggtaaaatctttccaatctggactctcctaattgaagagatgttgactcatacctgggcttagggccacgggtacaatcacaggtccatatcagtacaaatgtgtcagagtagattgtgactttcatacataatgtataaagccctcgggtggtacagagagtgtcctaacaggaccgagaacacggatgagaatatgacactcatgcatactcacccaacagtcaagattgtcatctttccacatgaacacagcccacagctgaggaactgaatctcacaactggaggcaaagggtggacttttcacatgtggaaccagtcaaaaggagggctggtgactttcagaccatgactcagcatacctgtaaggctgtgactaaggagacacagtccacaaaagtgattgaggctctcatgcacgattccagtccaccattgagattgtgactcctgtatttagacataacatacaagaggtgttgactcttgtacctggaaccaacacacgtgccaaattcttttcttttttctttctttttttttttttgagacagtcttgctgtgtcacccaggctggagtgcagtggcataatctctactcattgcaacctctgcctcccgggttcaagaaatcctcctgcctcagcctctcgagtagctgtgattataggcacacgccaccacaaccagctaattttttgtatttttagtagagatggggtttcgtcatgttggtcaggctggtctcgaactcccgacctcaggtgatccgcctgccttggcctcccaaagtgctgggattacaggcatgagccaccacgcccagcaactaaattgttaatctcattactagaccttcctgtaggtgacagtgtgacatatgcccctgcccaccacctgagtgattttgagttttctgcctgggctcagtcaaatgtaaaattgtgagatatctcttgactcagtatctaattgatgtgactattctgctttgtctgtaaccacaggtgacattgtgacatatttctgggccttgtacgcaggtgatgtgactctcctctcttgtcttggcgatgccccagagggcactgtgacacattactggatcctgcaccccggatatttggctctcctacctgtgccctgcccacatgggccattgagacctattgctgagtcccaagacccatgtgatgtaacttacctgctagagctctttctataaggggcatttgacctatctctgcctattatccaggtgacgtgactcttttctccaacctggtctcagtctacaggaaaaattgtgacatatctctgagactagctcctagctgatgtgacttttctctttttcctagcttctgcccactggggagattgtaacatgccccttgtcccagcactatgttgatatttactcttgccttcacgctgcaatcaaagatattgtgacatatttctgggcccagcgccaaagtgatgtgagtctcctgcctggatcctgcccataaggggtattttgacatatctttggacccatcaattcattgatgggaccttgtctcctatgagctttgccctggaccatctgcacaaaatagagaacgacttatcactgagcccagcacacagatagtgtgactctcctgccaattccctaccctcaaaaatgattgtgacatattcctggagaaggacccagatgatgtgattctcctgcctgctccttacccacaagtaagattgtgacatatatctttgctcagtttacaggtgtgaccatgacttttttacctcaaaccagccaatatgggtaatactatgggtcttccctttgttcgaaggtaatagagggttaccactttgttgcatatcatataaagatcttgggtggtacagagagtgtcaacacaaagcctggcacacaggtgaaattgtgttttacatacaccctgccaaccatttcattcatcacattcacacatagacaaagcccactggtgaagttttaaaacacacaggaatgcagcttacaattggaattaagactttcatatgtgaagatttggccacacttggaatggtaacttatttttaaatccactcataggtgggactctcctatctggactgagccaataggagtgatgttgactgtcatatctttgcttagggccacaggtacaatcattggtccataccagcatgaatgcctcagagtgaatggtgacactaacatacactgtataatgccatcagttggtacagaaaatgttttcacagggcccagcagacaggtgagattgtgaccctcatatgaacatccagctgaaagtaaagatggtcaaccacccagctgaaagtaaagatggtcaagtaaagatgtaagtcatacatacatcaacacagtgcaccattgaggttctaaatctaacaaccagaggcagtcagaagattttttttaaaaaaggctcttatacataaatgtggtccacaggtgggttggtgactctcagaccaggattcagcacaccaagaaaactgggactccattaagtcaacacaacatgcaataggaattgaggctatgacgcatagatctggttcactgatgagacgtgcctcatgtagttggacccaacattcaggatgtgttgactgtcatatctgaaactgggatatgtgcaggattgttaatctcatccctggaccttcctgcaggtgtgactgacaacatgtgcccagcacccagcataatttgaagtctcccacctgggcccagctcacagttgaaattgtgacatatcactgaactcagaacataggtgatgttattctactcttctgccgtggccctgcctacatggagcattgtcacatgtttctaggccccacactcagcactcaggttatatgtctattctgcctgtgcccagcccatgtggatcattgtgatatatttttggggctgacatttatgttttgtaagcctcctgcctggggtttgccagtagggagcattttgacatatctatgtgccaatcgtgcaggtgatatgaaccttttctactggctggtttctgctcacagggaagattatgacctatcagtaggccaacaggtaattggtgtaactcttagtctcaggttctgcctacaggggagattgtgacatattgctgggctcagcaacaagatgatttgggtcttctgcctggaccctgccttgtaggagcattgtgacataactctgagccaatcacctagttaatgtgaattttctcttctcttacctgaactgtgcccatagaatagattgtggcatatctctaggaccagcgtctaggtgatatgactctcctctcttacctgaccatgcccacagaaggaagttacttatgactgggcccagcacacaggtgacaggggtcatggagacctatctctgggcccatcacctggatgatgtgactcttcttttcttcatagggcccgtccatgtgaggaatgtgacatattgctgggcccagcatctatgtgatgcatcacttctcttgtgccttatctctttcaactggagtgattgtgacatgaagcccctaatttatgtgactcctcttttccatctgagccctacccacagggggcattgcaacgtatttttgagaccctcccctaggtggtgtgactctcatgagtgagccgtccactcagttggtattgtgacacatttttgcacacagcactgaggtgatgtgactctcttctactgcttgggctctgtccaaggaggtattgtgatataccactgggtccagcacctaggttatttgacttccctctactgcctgggccctgcatacattgtgtattgtgacatatggctgtgtccaaaacataggggatgcaactctcctgcattggctttgcccatagaagtattagaaaagactaataaaagagaataaaatatcttaattattcatctaggtgatttgactcttcttttgtgcctgagcactgcacacagctgagattgtgacagtgatatgcacacccagccaacagtatagactgtcatcatcccacctgaacacagcccactcttgaggttctgaatctcacacccaaagccagtcaaaaatagtgaattgactctatatgcagatttcattcacatttgggtttctgactctccaaccaacattcagcaaacctgtgaggctgtcactctactaagaagacagtccacaggacagattgatgctgtcatgcatggatccagtacaccattgagatcatgactcatgtacttatacccaacatgacatttcactgggcccagcaccaagctgatgtcactcctctattatccaggttctcactctcacctagttgacgtgactgtcttacctgtgctgtcttgtcaagggatatggtgacatattactggacccagcacctagttgatgtgacttttgctgctcctagggctcacagtcctaaaaaagaattgagttgtactgctgggcctagcaccaaggcgacaatactgttagctgtgtctgcatatcaaagtcataatctcacctgtgtgctggcccctgtaataaaactctgtactgccagggggcattatacaatatgaataagtttcataatctgccgtgactttcatacaggtaggagactcaggaccctaccagtttccttaagctcagctataagggtcaacatgtattttattggctgggtctagttataagagtcatcatggtgcctgtgagctaacatcacgcctgtggctggatctacatatgacagtcaaaattccagctgtaggctgtgtccatatacgagactcaggacctcactagaggtctctgttcatgtgtgagaatgacactcataactgttggctggatgagcatacaagagtcacagtctcatctgtgtactgggtgcacttatatgttaaaatcccacttgtggaaaagaaagaagctaagagagccacgtattttaagtgctgggctaaagatatgttaaaatatcccctgtgggcagggcccaggaaggagagttaaattacctgcatgctgtgaccagtgatatgtcacaatgccttctatgggcatggcccgggcaggaatttcacattacctttatgctgtcccaaagatatatttcaatccccctccattggcatggcttagagagaatagaagagtcacagcacctaaattatggccacagagataaatcacaatacctcctgtgggcagggcctaggatagaagcttacatcacctgtaatctgggcttgctaaaataattcatcctcctgttgccatgacccaggcagaagaggagaatcatatcatctaagtacttgggcctgtggtatgtcacagtccattttcaaggggcagaatgcaggcaaaagaaaaaagtcacatcacctaggcaacgagttcagaggtatgtcacaatacctaccgtgggcagggcccaggcagtacagtcacatcaccgaggtactgggctcagtgatatctcacaaatggctttctgggcagggcccaagctaatgataagagtcagatgacccagtgatatttcacaataccctctgtgggcagggctcaagcaagagaatcacatcacctaggtgcttgacccaggtatatgtcacaatctcccctgagggctgtgcccaggcaggaaagtaaaatcactcaggggttatgcagaagtatatgtcacaatcacacttgtgggaaggtccagggatgagattcacagttccacatatgttccagcttcaggtgggaaagtcaacacctcccatgagttgcatccaaatgcgtgagtcacaatctcaatgacggactagattcatgcatgagaccctcaattttaccggtaggctgtgtactggtatcagaggcaaagcctcacaggtataatgaatcctggtcctatagttaccgtctacctggagacaaaatctacatgtaaggattataattccaactttcaactgtgtccaggtgtgagattcagaagctcaagagttgtctgtattcatgtgggaggatgacaatttttactgtgggctggaagtgtatatgagaatcacaatctcagctgtgttctgggtcctcttatgacactctctgtaccaccagagggctgcacattgtttgggtgagactcacaatcccctgtgagacattagtgctgtataaatgcatgattttacttgttgccccactcccaggtatgagagtcaacatttctcatattggctgtgtccaggtataaaagtcattgctctgcctcttagttgggttcagatatgagtcaccatcccagtggtggctagaggtacacatgacattaaaaactccaactgtggattgcatctgtgagtaaaattcaggacctcaccagtgggttctgtccgtgtgtatgaatggcaattctctactgttggctgagtgtgcatctgagagtcacaatctcaactttgtgctgagttatgtaatggcactttctttacaaccctgggggcattatacaatataagtgagtgtgataatcctctgtgacatttatacaagcagaaaacccaaaaccttacctgttgccctaagcctaggtacaagagtcaaaatatcttctattggccaggttcattgtgcaagtgagttgggtacagaaatttgtcaccatccaacctgtggctggatccatatatgacagtcacaatttcaatggtggaatgggttcatgtgtaagatttaggacatcaccggtaggctcggtctatgtatgagcatggcaattcaaactgttgactaggtatgtataaaagagtcacaattacacctgtggactgggccctgcaatgacagtatttcccaagagctttatacaacatatgtgagtgtcataatcttctgttactttcctacaagtaaaggacccagaccccaaagcctagctaccagagtcaacatctctcttattagctgggtccaggtatgagtcatcaccattcctgtgagctgaatccagagtgagtcactatctcacttctggcaagatatacatatgacagtcccaattccaactgttggctgtgttcacatataagactcaggacctcaaaagtggtctttgttcctgtgttatagtgacaatagtaacttttggctgggtttgcatacaagagtaaaactctcatctgtgtgctgggccgagttatatgtcacagtcttaccttagggaaaggctgagaaataagagtaacgccaccttgattcttcacctggaatatgtctcaatcccctctatggaaaaggcccaggcagaagagtcacatcacttgtgttcagggcccagcagcatataatatttcctctaggcagagcccagacaagagattcatgacatttgggtcccgagcccagagatatgtcacaggggactaaagaatcttttctttaggcatgtttttggcagcggagagaagcacattatgtaaaaaattggttcaaagatatctcacaatgtccccttcgggtggtatgcaggtaggtgaagagagtcacatcatccagataatcagcccagcaatatgtcaaaatgccccctgatggaagggcaaataaaagaaagtcatggccgggcacagtggctcacacctgtaatcccagcactttgggaggccaggtgggcagatcacctgaggtcaggtgttcgagaccagcctgaccaacatggagaaaccctgtctctactaaaaatacaaaattagctgggtgtggtggtgcatgcctgtaatcccagctactctgaaggctgaggcaggagaatcacttgaaccagggaggtggaggttgcagtgagccgagattgtaacattgcactccagcctgggcaaaagagtgaaactccatctcaaaaataaataaataaataaataaataaaaattaaaaataaagtcacataaccgaggtgagtaaaccagagatttcacaatgcatgctataagtagggaccatggaaaagaggagcttcacataacctaggggctacacccagatatatgtcacaatcaccccagtgggcagggcctaggtataagaggagagtcacaccacacaaatcctaaaccaagtgatatgtcacaattcccactgtggatgggtccaagaaaaaagaaaaaagtcacatcatctacatgttggggccacagatatgtatcaatgttccctgtaggtatggcccaggcagaagaggtaagtcaagtcacccgggtgcagagctgagagatacgtcacaatgtcttctataggcaaagcccaggtacaaaggagagtcacatcaaatagtagatcagcccagagatatgtcacaatgcccctgtaagcagagtccaggcatgagactcaaatcacttttgtgctgggctcatcaatatgtcacaatgccttttgagagcaggaccaaatcaagagtaatatcaccttgtttgacctagtgatatgtcactatcttttgtttgcacaaaatataggaaaaagagacgagtcacatcagctgggtgctgaggccagagacatgtcaatctccccatcaacagaaatcacgtaggagaagagagtcaaaacacatgtatatgatgaggcgcggtcactcatgcctgtaatctgagcactttgggaggccaatgcaggtggatcaccagaggtcaggagtttgagaccagcctggccaacatgatgaaaccctgtctactaaaaatacaaaaattagtcaggcgtgatgataggcacctgtaatcccggctacctgggaggctgaggcatgagaattgcttgaacctgggaggtgcaggttgcagtgagccaaggtcatgccactgcactccagcctgggtaatagagtgagactctgtctcaaaacacacaccacacacacacagacatacagataaagggcacaaaaatatttaataatgtcccctataggaagggcccaggcagaagagtaaaatcacctgggtgttggactgtgcaatatgtcaaaatagccaatgtgggcaggcgatagccagaaatcacataaactgggtgcagggcctgtaaatatatcataatgtcttctatggagacagccaagacaggagaatagatcacatcagctaagtatggaaaaaaatgacatgtcataatctccactggagcatagactcaggcaagagggtcaaatcactcagattctgggcagagatacatcagaatcacacctacaggaaggtccagggacaggattaacagtcccacacatgtcccagttgttggtttggtctaagtatatgagtcacaatctcaaaaataaactggatctgtacaaaagagacttaactccttctgaagactgtttccccttagtgcagtcacagcctcacagatgtggggaatcttggtctgagattcaccaaccaacctagggacaagatccatgtatgagagttaattctccaactttccactgcctccaggtgggagattcagaacctcaacggtgggctgtgttcatgtggaaggatgacaatctttactattggccacctgtgcaaaagagtgtcataattttacctgtttgctgggctctgtgaggacagtctctctaccattcaggggctatatatgctatgtatgagagtcaacatctgctctgagaccttcatgctgttatgcacccatgattgtacctgtgccactaagtccacatatgagactcaacatctctcctattggctgagtctagatgggagagtcctgacctctctatgagctgggtttaggaatgagtcaccagcacagctgtggccaagtgttcacttatgacagtcagaattttaactgcagactgcgtctgcatgtgagattcagcatttcaccagtgggctctgtttagatgtgagggtgacaatcctaacagttggctgggtgagcatatgagaaacacaatctcgcttgtgttctgggccctgtgatgacatcttctctaccactggaggactttatataagatataagaaagtggtagttctctatgactttaatacacagaggagacccaggatcttacccatttcactaagtctagctatgaaagtatcttatattgactggttcgaggaaagagggtcagcaccctacctgtgagctgggccaagatatgtcataatcccacctataggtagagagtgagcaggagggttatatcaactgggagctggacaaggcatatatcacactcttccctgaggacaaagaccagctagaagagtcacatcccttcatgctaagtcagggatattttacaatgccttcctgaaagcagggaacacgatgcatactcacatcacctaggtgctgggcccagtgatatgtcacaatgctccctgtggacagtacccaggcaggaaagacacatcatctcaatggtgggcccagcaatatgtcccagtctttcctgtgggcagaatgccggcagaagaggagagtcacatatcctaggtgatggattcagggatatgtaaaaagttttctgttagcaagaccaaggcaggagccttaagtcccattgatgtagggcccagccatatgtctcaataccccaaatatgcaaggcccaggcaaataagacagtcacatcacctaggtgctcggtcaagggacatgccccaatcccctttttctgtcaggacccagacagaagaaaagagtcacaacacctaagtgatgaacaaaaagatgtcataatacccctgctggcagggcccaggtcgaagagttgcatcacttaggttttgatcccagccatatgtcacaacatagaatgtatgcagggccctggcagaagaggaggagagtcacaacacctaggttcttggccccgtgatacatcacaattccttcttgggcaaagtccaagcagtagaagagagtcacatcatcgtcatctagttgctgggtccagcaatatgtcacaataccccctaagaagagggcctaggcagaaaagtctcctcacctaggcaagaggcccagaggtatatcccaatgctttctgtgttagggctcaggaagaagaaagtcacaaagcctatgggatagaccaagttatattttacagtcaccctagtaagcatggttgaggcatgagtggagagtcacatgatgtaggtgctgagccaagtgatatgtcacaatgccctctgtgagcagtgaccaggcaggaggaagaagtcaaatcacctaggtgataagtgcagagagatgtaacaatattccaggcaagagagtaacatcaccttggtgttggattcagaaatatatcacaatgtcccacgtgagaaagatacaagcaagagagtcacaagaactgggtgcaagacctggcaatatatcataatttccactgtggacagactcaagaaacaaaaggagactcacatcatataggttatgggccccagagatatattccacttacctctattggcaaggaccaggcagaagtatcacaccacctttgcgctcagtaacgtactaggtcatatcacctaggtgataaacaacaatacatcgccgtttcttttctgaacatagctcaggcaagagaggggcattgcatttccaaggtgctgggcccagatgtatgtcaccatatcccttatgggcaaagatgtggtaaggggggatagtcaaatcaaatagttgatgggcccaaagatatgtcacaatgcactctatgggcagggtccaaacacaagacacacttcaccttggtgctggtaacagcaatatgtcacaaggccttctgaagacagtgccaaggcaaaagagtaacatcaccatggtgttgagcccagctttatgtcacaatctcccctgtgaggaaaacctcagaaggcaagagaagtcacatcagctcagtactgaacaaagtgatatgttccattctcccctgagagctaggatcaggcaaatgaagatactcacatcacttggtgacaggcccaggatatgaaacaattttctgtataggcagggcttaggcaggagagttaaatcaaatgggcataggacccagtggtatgttacaatgcctcccgtgggcagcgtcaaggcatgagagaagacatcacccgagtgcaaggcccagtggtgtcaaaatgtcccagcacccagttatatgttacaatgtcatatgtgagcggggtccaggcagtagagtcaaatcactcaggtgctggactgcggcatatgtaacaataacacctacaggaaggtccagagttgagattaacaatctcacacatgtcctggttctaggtatgagtcaatttctgtctggtcattctaagtacacaagtcacaatcccattggccaacaggatctatgtttgacagccctattccttctggggattgtgttttgtaagtagagtcacagcctcacgggtttgctgaatcttaatctgagtgtcatgaacccacttggggaacagattcatgtatgagagtcaaatttgcaacttttagcgacctcaggctgtgagattcagaacctcaacagtgagctgtgttcatgtgggacaatgacaatctttattctcacctgggtgtgcagatgagagttgcaatctcacttgtgtacggagccctgttagaacactctctgtaccactcgagggctttattcaacatgcatgagagtcaaaatttgctctgaaacctccatgttagaaaggatctttgatcatgcctgtggccctaagcccaggtgtgagagtcaacatctttcttattgactgtgtccggataggagagtcttcacctgcctataagttgggattaaaaatgagtaaccattccaattgtgccttgatgttcagatatgaaagttgcaatttaaactgtggactgactgcatttgtgtgtgagattcaaaacatcaccagtaggttctgtgaatgtgagagggtggaaattttaatggttggtggactgtgcacacgagaacacaatctcactcatgttctgggatttgtgatgacattgtagtacccgaatgctttatgtgatatgtgagactggcaactttctttctttctttttttttttttttgagacagagtctcactctgtcgcccaggcttgagtgcagtggtgcgatctcggctcagtgcaacctccgccccctgggttcaagcgattctcctgcctcagcctcccaagtagctgggattacaggcacctgccaccacacccagctaatttttgtatttttagtagagatggggtttcaccatcttggccagctggtcttgaactcctgacctcgtgatccacctgtctcagccacccaaagtgctgggattacaggtgtgagtcactgtgcccaggctgagagtggtaactttctataaccttcatacaaagaggagacacagggtcttactcatttttctaagccaaaatatgagagtcagtatctcttctgttggctggttcatctcacaaggtatgatggtcattattgcacctgtgagctgaaccaagatatatgtcacaatgccacctctcagtagggagcgagcaggagagccacatcacctaggcactaggccatggatatgtcacagtcttttctgaaaacagggaccaggctggagagtcacatcgttagcatgcttagccaaaaatatttaaaaatctcctgaaagcaatgcaacaggaacagaatcacctcacctggctgctgtgcccagcaattttgtcacaatgctctctctgggaaaatcccaggcaggagagacacatcaactggttgctgggtgcagaaatatgtcacagttttccttgttggcaaagttcaggcagagaaagattcacaattcttaggtcatggatgcagacgtatgtcacaaggctcactgcaggccaggcttaggcaggagcctcatgtacccgaggttctgggcctagtgatgtgtcatgatacccaaaatatgtggggcaaagcaaaaagaggagaattacatcatctagaatcagggtccagtgatatgtcacaattttttttttttggcagtgccctgatgaaagaagagtcacatcacctttgatctgggtccagtaatacatcacaatcccttcttggtcacagcccaagcagcagaagaaagtcaaatcacttaggtcctgggtttggaaatatgtccctatgaggagagggcccaggcaagagagtcaaatcactgaggtactgggcaaagaaatatgtcacgatcacacctgcagaaaagtccagggataaaattaacaatcatgcacatggcccagttctaggtataagagtcaacacattctgtatgttgggtctcagtacaagagttacaatctcaacagtggacaggatccttgcatgacagccacaatccctcccgtgcactgtattattttcaaagggtcacagcctcacaggtgtgctgaatcttggtcaggtgggttgctgactctccacataatgagaatcagttttccaactttcgactgcctcctggcatgagattcaggactttaacactggctgtgttcatgtggttggatgacagtctttatcattatctgggtgtgcatatgggtgtcacaatctcatttgtgtgcccggccctgtaaggaccctctctgtcttactgagggcattatgcagtatgcatgagagctgcaatctgttctgaaacttttgtgcttgtgtgaacccacaattttacctgtgattctaagcccagatatgagagtgaacatctttaataatggctgagtttagataggagggtcttcatctgcctatgagctgggtttagaaatgagtcaccattccaactgtagccaggtgttcacgtatgcagtcacaatttcaactatgaatggcatccacgagtttgattcaggacctcaccagtgggctctgtttatgtgtgacggtgacaaggctaatggttggctgggtgcgcatacaataagaaaaatttctgttgtgttctggatacactccctgtgtcacctgaatttatgctctccatatcacccaagggctttatacaatgtgagaggaagtggcgattttttatgatctttgtacaaagaggagacctggaatcttacctgttctctcagcctagctaggacagagagtgcctttttttactggctaatttgatatatggacctgccaataggggagattttgccttttttattttaggcttagggcagtggataaagtactgggtctcctatgtgaggaaaggtcacataagattatggacactcaagcttatcctataaagcttttgtgttacattgagagtataataacaggatccactacacaggtgagattgttactctcataggcacacctagctgaaaattaggattgtcaccctcacacataagaaaagcccactggtgaggtcctgaatctcacaggcacactccaaaattagatttgtgacagtcatatgtgggtcctgggacagttggtatgctgacttatttttgaagccagcttacagacactttgagatgactgtcatacctatatctggccaataagagagctgtgactctcacacttgggcatagggcaatgggtacaatcttaggttcatatcagcatgaaggtctcaaagtgaattgcaactgcctcttaaagcatataaagcctgtggataatacagagagtgtcataacacaaccaagaacacaggtgaaattgtgactctcctatgcacactcagccaacagtaaacattgtcactgtcacacatggaaactgtccactgttgaggctgtggatctcacacatgggggcagtcaaaagttggaattgtgactctcatacatggatctgcttaacaggtagaatggtgactcaaagactaggattcagaacacctgtgaggctgtgactcttagattcagaaatagttttcatttggaattggggctctcttgcagggagtgagtccaccattcagattgtgattcatgtacttggacccaactcaaatgaggtctcttgactctcatacctgaagtcagaaaatgtgtggaattttgaatctcatttctcaaccttcttgctagtgtgattgtgatatatacatttgcccagcacctgagtgatttgactctcctgcctgggtaaagcccaaaaataaaactgtgatgtatacctgggccaagcatttaagttattttactttcttgcataggccttgtcctcaggggaaattgtgacatatcactgggcccataacctaggttatataatcatcctctcctgcttgggccctgccaatacagatagttgtagcatataattgggccaatcacctaagtgatgtgactttactcttttgcatgggctttgccacagagtgggttgtgatatgtcactgagccctatgcgtaaatgatatgactctcctgccttggtccctccaaaaggaggcattgtgacctatcaataggcccaacaactgggtattgtgactctcctctcttacctgagccctgtacacagggtgacatattgctgtgccctgcatgcagataatgtgtctttcctgcatgaaccttgcccacagaaggcattgtgacatactcctgggcccagtacccaggttatgggacttctctgccatggccctccccacagagtggatagtgacatgtttttggtccagcattcaggtgacatgattctcttttctggtttattcacacaggctaagctttaacatatggtttttccagctcacaggcgttatgattacactcatataagaacccagacaataagaatgattttgaagctcttagactttaggcagtaggtaaagtcctgggtttcctacttttagaagggtcacagagatgtataaaatttatgcatatcctatatatactttgctacagagaatgtaataataggactcagcacacaagtgagattgtgattctcacaggcataccaagccaacaattgggattgtcaattccaaacatgaaaggtcactggtgagcttctgaacctcacacgcagatgcagtccacagtcaaaagtctgactgtcatgtgtacatctggaaacaggttgaatagtgactgatttctggacacagctcagaggcacagtgattagttgcatacctggacctagcaaacaggagatatgttgactctcatagggagccttcaagcaatgggcaaggtcctgggctttctacttgtatgaaggtcacagaggattacaaaactaatgcgtattgtatgatcccttcggtggtacagagagtgtcataagagattccagcacaaagttaaaattgtgattctcataggcatacccagcaaacagtgagaattgtcactcccacacgcggacagagaccactagtgaggtccagagcatcacatgtggatgccatccacagttgaaattttgactgtcatacgtggatctggccacaggtgggatagtgacttctttctgccgccaactcacaggcacagtgagaactctcatatctgacactagccaacaagagagatgttagctcttattcctgggcttacgacaatgggtaagatcatgagttcataacagcatgtagatctaagtgtggattgtgactttcaccagagaaagccctcaggtggcaccaagactgtgataacagggcccagtgcacaggtgagatagtgaccctcatatgcatgtccagttgacagtaagaattttcaccctcttaaatagccacagcctgttgttgaggttctgaatctcacacttggaggtagctaaaagttggaattgtgagtctcatacatgaatcaggtgaatacctgaatacagatgagataatgactcacagaccaagatttgtcacacctctgaggctgtgactactgccaggacacaatctgaaggttgaattgagactctcaggcacaaatccagcccagtatccagattctgacttgcacactaggactgaacacacaggaggtgttgactgtcctccctagagctggacatgtttgggattctgtatctcatccctggacttttctgcaggtgtgattgtgacatatgcttttgcccataccctgagtgattgtagttttcttcttgggcccagcccacagatgaaattgtgacatataccaaggccaaggaccaaggtaatatgactctcctcatctgcctgagcccattacttagaagtgatttttacatatttctgaattcaacacctaggtaatgtgactctcctcttgtgccaaagttttgatcacacagaaaattgtgacatatcactgggcccagcacctagatgatgtgcttgttctgccttaattctccccacatgggacattatgacatatttcttagtcaaacacctaggtgaagtaactcttctctcctgcctgggtctcagcttcagaagaacatgtgacatattgctgcacccagcacttaggtgatttgagtcctctgctgcctaatctttgcctacagtggggattgtgaactattgcttaacccagcacctaaattttgtgactcacttcttttgcaaagttctgctaacagtgggagttgtaacatattacaggaaccagcaaacaggtgacctgactgtcctctcttccctgggccctgcttatattgggcattgttacatattgctgggctcatcgcctaagcaatgttattgttctcttctgcttgggacctgcccacatgatggactgtggcatatcactaggcccagaacccagctgatatgactcttcttccctgatcctgctcatagtgaggactgacatattcctcttctagcatccaggtgatgtgactcttctgcctggtccctgtctgcatgtgggattgtgatatacatctgggctaaactcactggtgcaatgatgacaatcatacttgaacccagcaaataggagagatattgattctctttgctaggcttagggcaatgagtaaggtctgggtgtgtttcccgtacaaaggtcagagaaaattacaatactcatgcatattgtataaggctttcagttggtacagagagtatctaacagggctcagcacacagatgagactatgactctcaaatgcacacccagctgacagttaggattttaacttacacatgttaagatcacaaatgtcacatgtaaatgcagtttgcagttagaattgtgacttatatgtggatccagccacaggtgggatggtgactcacttccgaatccagccgacaggcacagtgatgattctcattcctggatgcagcaaattagagagagaggttgactctcatactgggcttagggcaacaggtaaaataggtcataccagcacaaaactctcagagcagactgtgactctcatgcatatcatataaagcctttgggtgatacagaaaatgtcataacggtgccaatcacacagggaagattgtgatccttaaatgcacactcacccaaaaataagagttgccactctcccacatggacacagctcacctttgaggttctgaatctgacatccagagacagttgacagttaaaatcatgactttcatacatggatcccatccacaggtggggtggtgacgcttggaccagaattcagcacacccatgggcctgttactctcacaccagaacacagcccctaggtggggctgggactctcatgcacggatccaatttactattgagatgatgagtcctgtacttgtgcgtaactcacaggaggtgttgactctcatacctaaagctgggacacgtgcagaattgtaaatctaaccactggaccttcttgcaggtgtgatttttatgtatacatttgccgagcccttgaggaattccacctgcctgggtaggccaagcctacagtgacattaattaaatcaagcatctaggtgacatactctccttcctgggcactgccctcaagggagattttgaaatatttctgggcccagcacataagtaatgggattctttactcccgcctggttcctgcacactgggagcattataacatatcactgggcccaacacctaggtaatatgactctcttctcacgtctgggccctgcccattttaggaattgtgacatagcactgggcctagcacccaggtgaagtaaatatccttttccatttgggttctgcatacagggggcatgataatataatgcagtgcccatcattaaggtgatgtgactttacttcatgggcaatgtccacagggagcattgtgacatatctctggacccagcacctagatgatgtgactccctcctgcctaggccctgcatatagggggaattatgacatattgctgagtctagcacctgggtgatgtgactcttctgcctgagccctgctcacagggggcattttgacataactttgggttcatcacctagatgatatgactcacttcttctgcctgtgctttgcccacaggaaaacctggaccatatcactgggctgagcacccagataacgtgactgtctttcctgggccttgcccacagggggcattgtgacatttcactgggcacagcgctgaggcgatgtgactctcttgcctgggtcctgcccgtagaggaaattgtgacatattcctggtccagcacccagggaatgtgatgatccagcctcatccctgcagccaacagggatgaagatgactcttaagcctgaactcagctaataggagagatggtatctttcatagccaagattagggcaaacaataaagtccttagtttcctaattgtataaagatcacaaaggatcacatcacccacgcatactatataaagcacttgagtagtacagagagtatcataacagggctcagcacacagttgagattgtgactctcatatgcacacccaggccacagttataactgtcactctctcacatggacagagcctgctggtaaaattctaagcctgaattgcgaacacagtccacagttggaattgtgattcatatgtgaatatggccacagttccaatggtgactcacttatggactcagatcacaggaatggtgataactctcatacctggatccagccaataagagatgttcaatctcctacctgattctagggcaatgagtaagatcaaggatccatacaaccatgaaggtctcagagcagattgcgactctcaggtgtagggatatatatatatatatatatatatatatatatatatatatatgcacacacacacacatatatatacacacatatatatgtatatatatacacacatatatatgtatatatatacacacacatatatatgtatatacacacacacacacacacacacacacacatatatatatatatatatatatatatttttttttttttttgagatggagtctctctctgtctcccaggctggagtgcagtggcgtgaccttggctcactgcaagctccacctcccgggttcacgtcattctcctgcctctgcctcccgagtagctgggactacaggtgcccgccaccacggctggctaatttttttgtatttttttagtagagacggtgtttcaccgtgttagccagggtggtctcgatttcctgacctcgtgatctgctcacctcagcctcccaaagtgctgggattacaggagtgagccaccacacccagccctcaggtgtatattttaaagccctcaagttgtacagtgtgtcataataggacccagcacactgatgagattgtgactcttgcatgcacacccagctgacagtaagaatcgtcatcttcccacttgaatacagcacactgttgaagtcctaaatctcatagctggaggcagtcaaaatttggaattgtgtctcagacaagaatccagtccacaagtgagataatgactctctgacctggatttagcagccctgtgaggctgcgagttccctactgggatatagtctgctggtgagattgaggtcccatgcacatgcccagtccaccgttgagtttgtgactcatgtacgaggacccaacacacagatgttgaatctcatacctagagctgggacatataaaggtttgtcaatctcatccctggaccttcccacgaatgtgattatgacaaattcgtttgcccagccccttagcaatttgactttcctgcctgggcccaggccaaaactggaattgtgacatatacctgggccaaacacctaaatgctgtgactttcttcttttgcctgggatctgcaaacagaaaagattgtgacatattgctaagcccagcatttaggcgatatgactcttcctccagggacatggtgacatattcttccccagaatatgggacattgtgacattcctccctgttcctacagggacattgtgacatatccctgggaacattaactagattaagggactcccctctcatccctgggtcattccctcaggggggattatgacatatcactgaatccagaacctaggtgattttttttttctcctctactgcctggaccccatccacaagatgaatggtaacatattgctgagcccagcaaccagatgatgtcactttcctctcctgcctggaatctgctcagaggtggagagttacatatcactgggcccagcacataggaaatgtgactctcccctcctgtttgggccctcccaacagtgggaaatgtgagatgtcactgggctcatcacctagatgatgtaatgcttcttccctttattgatccacccacagtgggaattgtgacatattaccatgatcaacagctaaatgatgtgactcttttctgctgattgagccctgcttatagggggcattgtgacatttagcttcaccttgaacccagatgatttaactctcttatctgggctttgcctatggagaacactgtgacatatctctgcaccgatcatctaggtgaagtgactctcctctcctgtctggttctggctcaaagaagggaatgtaacatgtcactggacccagcacctaggtaatgtatcgctattttctcttaggccctgctttcatggtaaattttgacatatatttggatgtatcacctagatgatgtaactctcttttcatgcctgggcaatgcccaaggggagattgtgacatgttgctgagcccaggacccaggtgatgttagtctcctgcctggccttgcccgcctacaaaaggcattgtgatacatctttgtgctcatcacccaaataatgggagtctttttacctgccagagccctgttcttagggaaaactgtgacatattactgtatctggcatgtaggtgaggtgactcttctgcctatgcattgcccacaggaagaattgtgacatatcactgaacccagaacctaggtgatgtgacttttttcctgtgccttacatgcaaaaaaataaaaaatatcactgggccccagaactaggcgaggtgactcttctctactacctgggtgaaccccttataggggcattgtgacatatctctggccccatcacctgggtgaagtgactatgctcttggctgaataggtgctgcccacagctgtgattgttacaaaatgctgggcccagcactcaagtggtttgactctgctgcatgggccctgcccacagagggcattgtgatatatgtgtgggcccatcaactaaaattgtgactttctacattagtctgttctcatactgtgaataaagtcatcctcaagactgggtaatttataaaagaaataggtttaatggactcacagttccacatggctaaggaggcctcagaatcatggtaaaagataaaggaagagcaaaaggcatcttacatggtggcaggcataagggcaggggaactcccttttataaaaccattagatcccacgagacttattcactaccccaagaagaatataggagaaccacctccgtaattcaattatatttacctgtccttgctcttaacatacagggattgttaaaatttaaggtgagatttgggtggggacacagccaaaccatatcagtgttttctcctgcctggcccctgtccataggggagattttgacatatcactgaacccaacaccttggtgatgtgacgctcctggtccctgccataaaagagaatggtgacatgtcactgggctcagtacctaggtgatgtgactcttctctcctgtctggactctgtcctaaaagagaattgtaagatatcactgagactagcccttaggtaatgtgattttcagctcctaccagggccctgtctacaaggggcaaggtgacacagtgtggggactatctcccaggtgatgtgactcttctgcattggcctggcctaaaggggaaattgtgacatatctctgggcctaccacctagctgatgtgaccttcctcacctgcttgtgctctgcccacaggaagatttccacgtatatctgcgtccagcacctaggtaatgggactcttctgcctaagcactgcttacacaagccattgtgatgtattcctaggcccaagacacaatgatgtgacttttcactcctgcttggcactgtgatatatcatggggctcatcacctagatgatgtaattcttcttttgcttgggccttgcccacaaaataaatagtgacatattgctgggcatagcacctaggtgatgtgatacatctgctctggcctgtaccacaaagggcactgtgacatgttcctgaatttagtgctcaggagatgtgaccctggggccagagctgagtccacaggtggattgtgacgtattccttgcccagaacctaggtgacatgactctttcttcctgcatgggccctgacttctgtgagggttttgacaatattactgggccctacacccaaatgatgtgactctgctgcctgagttctgtcaaaggagggattgtgacctatccagtaggccagaacctacatgactttcctctccttcctgagccctaaacagaattaattgtgaaatattgctttacacagaacccaggtgatgtggttctctaggctaggccctgcccacagaggcattttgacatatggctgagctcagcactcaagtaatgtgactttcttgccagggccctgaacacagggggttattgaaatattcctagaccaacattcaaacaatgtgactctcctgtctggtcttcccacaggtgggattgtgacatacctaggcctagctcacaggcgtgatgatgactctcatatgtggacccaacaaacagaaaagattttgactctcatggctagaattaggggaataggtaaggtcttctgtttcctacttgtggtaatgtcacagaagatgatgacactcatgcatatcccataacatccttgagtgacacagagagtgtcctaacaggactcagcacacaggtgagattgtgcatcccacaggcacacccacctgacaattacaattgtcactctcacacatggacagaacccactgttgaggtcctgaatctcacatgtggacatgatccacagttagagttgtgactgtcctatgtaaattcagcaatgtgtgagatgatgacttatttctggatcaagctcacagatgcaatgatgactctcatatacttggatttagccaatagaagaggtgttgattcttgtagctgggcttagggcaatgggtaaggtcctgagtcttctacttgcagaaagttctcagaagattaccacactcatgcatataatataaagcccttacgtttcaccaagagtttcatattaggtcccagtacaaagttgagattgtgactcttctatgcacacccagctgacgggattatcaccctcacacatggacagagcccactgctgaggttctgagtctcacttgtggatatagctcacagtttgtattgtgacttttatatgtggatcttgccacaggtgggtgtcttatttctggactcagctcacagacacagtgatgactctcatacctggacccagcaaagaggagacatgttgaatcttgtattaggatgtttgtgtgtgtgtgtctgtgtgtgtgtgttttagttccttgagctttggaaattgattctacagtatcttatacagatgtaaatgtatcaggctttttttgtaaagctatatatatatattcctcctgtttattaaaatattgtcattggtgttatgtagatatagttgtagacctcaaaacagaaaataatattgtaaatattatagcttaataaatgtttatggtatctaaataaaaaatgtaaattatacatatttggaaggtagttatttacaattgcttagagcttacctggtcagccaaggcctgccttcaattgcacctgcttggttacagtatctcctggggtgaaatggccctcactgagaatggtcaaaataagaaaaaaattttggcagataaatcttacgtgtaaagaaacagagatgtggaaaaaaatgttcagagaaggataaataaatcaattttaccacagttatttttaagacagtaaatgctttaggccaggtgcagtgactcactcctgtaatcccagcactttgagaggccgagttggcagatcacgaggtcgggagttcgagaccagactggcctgcatggtgaaaccccgtctctactaaatacacaaaaaattagctgaggatggtggcacgtgcctgtaatcccagctacttgggaggctgaggcaagagaattgcttgaacccgggaggcagaggttgcagtgagccgagatcacaccattgcactccagcctgggggacagagtgagactccatctcaaaaaaaataaaaataaaaataaataaacagattcttcaaagtcaaataaaatttatttaattaaaaattgcagacactgggtgcggtggctcatgcctgtaatctcagcactttgggaggccaaggtgggtggatcatgaggtcaggagtttgagaccagcctggccaacatggagaaaccctgtctctactaaagatacaaaaaattagccgggcgtgttggcaggcacctgtaatcacagctatttgggaggctgaggcagaagaatcacttgaaaccagaaggcagaggttgcagtgagccaagaccatgccattgcactccagcctgggcaacagggcaagactccatctcaaaaaataaaataaaataattgcaaattggagtgagccgagatcatgccactgcaatccatcctgggtaacaagagtgaaattctgtctcaaaaaaataaaaataaaaataaataaagtgcaagacggcctatagaagcactgaaaaatctggaaaattagcaaaatgttcatgaacagttgaataaataaattgtagtgtatttatatgatgtcatattgtagatcaataaatatgcaaaccacaagcagcaaaattcagatagtggtcactttcgggaagtaggcttatagaagactttagaggtatgtactttatgagagtatgtgaggattatatgaagccagactgaaagtttcctgagagtagagaccaaaactttctttttattttttgagatggagtctcactctgctgcccaggatacaggtatctgggcccagctaatttttgtatttttagtagagacagggtttcactatgttggccaagctggtctcgaactcctgacctcatgatctgcccacctcggcctcccaaagtgctgggattacaggcatgagccaccacgccaggccaatactttcttttcttaattttatctcccaaggctagcaaaaagcatagcacaacgtgtatgctcaatgcacatttattggttaaatgaataaatacataccctttgtaaactgtcaagccctatgcaaatcaagaatttatttttattacttactacagtttagttaatagaatcatataaaaggtaatcaaagttaagattcagaaagcactattcaaaatttaatgttaccccagcattcttaggcaaaataaagtaaaatttatagtttctaaatttgtgaccattataattacatttaaatttccatgtgaggctggaacataaaatcttccatcaggtgagcataatttgagagaaaaatacatttaaaaataaagaaaaaacaggaaaaagaatgaaaacttggttgggttagatctgcaagttctattccatacttctttttttttttttttttttgaaatagcttcccatactcctggtgcagagggaggctgaggagcctgggtccctctgtccttccactgtggcagtggctgatctctgctcaggcatgagaagtgctgccctgtgctgggtctgaggctgccctgcccagcccctcctcactcccttggactcttcacagtgtctccaggctcctgtgccatcctgagcatccctttgatggaaagggaggtggcagcaggaagccagtaggaggaactggccctgcagaccgagagatcttgtccaggaaatgctctggttggccttggcttttggtgcatggagctggacatcaaccctgggttgtagctaaggtgtccctgggctaggtgaccctgggcatggatgctccagttgctgctgccattcctgctgtgctcagctgggccgcagctggaaccattgccagtcagaggtgcaggagcagccctccaggtgggaggaggccatagccatgcatggttcctggaaaccaggccctgctgacaaatcttagatgccaggaacagaagaaccaggagaaactgcctagagcttgaggcaaatggatggactgttggaatggctgagggtgaagctgcccaaaatcctcaaagtggagtagcaaagcaagcatcagagatggacaagaaaaataaaagtcaaaaaaattagcagaaactgtagcaggatgagccgcagacaagaacccctcagacaccaagttgtggaaggaaagggctttattgagctggtagcatcagcagactcacgtctccaaaaactgagctccccgagcgagcaattactgttccttttaagggcttacaactctaaaggggtccacgtgagagggtcgtgatcgactgagccagcagggggtacctgactgtgggctgcatgtaccggttattagaacagaacagaacaggacagggattttcacaatgtttttccatacaatgtctggaatctatagataacataattggttaggtcaggggtcgatctttaactaccaggcacagggcatggtgctgggctgcctgcctttgggtttcatttctgctttttagtttttacttcttctttctttggaggcagaaattgggcataagacaatatgaggggtggtctcctcccttattcccccactttgagaacctcactcattagtgggagttctcactttcatcctcactacccatgtcttcttgcaagacagattgatagtgattcatatagtacacttgtgctgaagcattttgatgcactaaagtagtaacaaaacttttcattacttgaaggagcaaaggcagcacacagggaagcaacatgcaggtttctattactattataattcctattatagtagttttaaatcctcctagtgctggaaaccattttccaaacatggacctaggattaaacccatgccacacctgcatgggaacatgtgccagctttgttattttaattatatcttcaactatttgcccttggtcatctatgtgcagacagcaattggtcatgttaaactttccacagatccctccttcagctgctagcaagtagtctagggctagtctacttttatagatagcatttctcatctggatttcttgcagggctaaaacagttaaagctctgccagttttattagtgattatttccaagacagcttgtaactgtgtgattcggttgagcatataaatgggggttcagtatccctacgagccatcttgtgcccaagtggcaggcccatagtactgtatgattctttcaggggaccacttgtcatcttcccagtcgcctatagctatccttctcttttctcggggagcatagacatgacagcctaggagcttgcctgtttttatgggcagtaggaaaaaggacagtttaatggtgccaataacacaactacctgcccattggtcaggtaacttggcataagctctatgcccacatattcggtataattcagaggaggctgtccagacctgatgggactccgggtgtctccatacagtttgcaactttggaaatttgctaaacggatttctttcagtgtggtttgaactccaccaggtggctgcttttgtagtgtacagtttttgcccaaggcagctgtcttcccacaggaagggtgaagtccttcctcacccgtgctatacagtattgtctaataattgaggtttttcagaacccagaagttgccagtctttaatcttattttaaaaatggtagtcatagggggcttagatgggttatagcacacatcaggctggtcacttcctgggctacataccctgtatagcattatacaaataagttcctcttagagtcccggtacacttacaataaccataaaataatagggctgtagtaaccttttgtcttacctcagtgacttgatgtatatgtagggaacagtcctcagtctgaggaaggtcagttgaagtccttactgtacaagtccaaattttaaggaaaatgagtcccaaaatgagtttcctcatgctttggccatgtgtggatcagtcagcttctgggtatgactggatcagggcttgtagtcttctgaatcactttgcaagggttggtgaagctgctcccatccatgtacccagtctactgatgtttaaggatggtcttggaggttgggcctgctagaataaactgagtccaacacctctacacagttatgttcaactgcgctctctgatactgggagcaaagtggcggggttcagagtgttgcaatcttcaatggttatgcgggaattttcacagagcaagctttggtatttagttagcctagcatttgttagccaatgatggcctttggtatttattaaagtcactacagcatggggggcctttatgtttaggttttgcatacgagttagcttacccacttcctgtgctagctgggctgttgctgccaaggccctcaaacatgggggccaaccctaagaaaccccatctagttgtttagagaggtaggccacgagcctcggccaggaccccacagtctgggccaaaattctaactgctaatttttgtctctctctgacacatatagtgtaaaaggttttgtcaggtcaggtagccccagggctagggccaacatgagtttttctttttaactcatgaaaagcttgctgctgttggttgtaatagatgtagtttatccaatctacatttttattaactgtcactcaccaaaatattcactcaaatcctgcagctatttgattttgggctttaaattgacctggtgttccctgtgggactccaattgtgtctaaatagacgtgagcatcagaagacccataaggggcttctcccactttatgatgttttatttttcctccctctcgttgatgaaatgccagggtgaaagggatagccaattggactaaagcacaagtgccactccagttatttggcagagtgcccaataaagatccaccacaataccaccacacatccaccagggatgaacaagggctgactgattgataaactcttgaaaaaaaattttttttgaaatggagtctcactctgtcacccaggctggagtgcagtggtgcgatcttggttcactgcaacctctgcctcccgggttcaagctattctcctgcctcagcctcccgagtagctgggactacaggtgcctgccaccatgcccggctaatttttgtatttttagtagagatggggtttcaacatgttggccaggctggtctcaaactcctgaccttgtgatctgcccaccttggcctcccaaagtgctgggattacaggcgtgagccactgcgcccggcccagctcttgaaaattcttaagctcactgcatcccttcaggtctccaaggaacactgtttcctccctgtcctgagagacacgaagtgaacttagtgttggaaaatggaggctggatggccctcaggggctgacccgcaaggtgctgtatttcgggatatagcagagagagagcttggcatgactttttaccctaggctgtagaatcttggaaaagagctacaatgtaacccaggcccatttgactggaggaccaccctagtggaaaggggacaatctgggcctctggcctgccatgtgctcaagcataacaattgcttttgtttaatgtgcggatggaatatttgatccactccaaccaggcatttacatcttggtatcctgtcttaattgccaaagtttgttttaggtttttaacttctatgatcctctagtaaaatgaatgtatgattttaggaaattacaaaaatggttggggcagtccacacttgctctttagtggtccacagaatgttggatcaactatggcataaaagctctacattggggggcaagaatcgtggttgacactggggtctttatcaaaatctccgtggattaaatggtcctaatttactaatgcccagtctgaggagagtcaggagggacagaggtacttttctgaagtagagagctgtctttgacttggcaagtccccacagggtataacaaggcaagcattaagtgcaacagtttgaggcaaaattgacttggttatgttaataactagatgatcagcaatagagcaaggaaagaagaaagagtaataggatagatgaaagagagttaaatttttcttagctttagtttggtaggggtttcccctgggactatggcccacgactctggagggggtggcactttcttgactcaggtatgatgagtccatcccctttttgctgtatgaacaacagtctcagtggttagcagcacaaggtagagcccttcccaggctggctcaagtttttcttctttccaccctttgataagaacatgatcttcaggctggagctggtttaccaaaaattctaggggtggtacatgtgctaaaccaagtatataatttttaagaaactgaccttttgttttaaatgtgaggacatcagcagtggattttatagtccttggtgcctttttactgagaaatttcctttagcgcctatttttattagtttttagaccaaagaaagccaaacaccattttatatttgacaatgcttcttgtatgatttttataccagataagctaaatttcacatttatattcgtgtgttattaatgttaaacttagttttaataaaactttgtagacatatttatccaatttttaatttctgaccataaggtaagatttttatagactctttttaaccttttataatttttgttaaacagcagattagtgctttaagaaaaacctgttgtgtttttattttaatgttccgttcacagaaaaactggatgatacccttttaactttagccaatatgtttacacacagaatttcctttacaattaacattttaaaacctgcttaaaccttcaaaacaaatttttttaaccttttcatgtaggtaaaaatccacattcttatgcctccttataatccttttaccagaggtgtattttactttccttatacaccttgcacataaactgtatttttcaatagttttacattcaggaggcctagttacttttaaattatacatttattgcataaattctttttttaaaacatttttttcacaactttcacagacaattctttgacatgtctcaactttctgacttattacaaacatttctttctttaagcaaccagttcatttatttcaggacaagaatttaccatataacattctttttacaaaaattctgctgcctattttttttccctttttgttttttctaagataaccattcttttccaaagcgaacttcctttatgtctgtggactagactaaggccacaagattagaagttactataatacatgttacactgttaacttttagcaaagtttacttttgttgaaaaccttgtaagtttgggatttccattatcctttgctattaataagaccttgtttagtccaaattaacttagaattggtatagatggctgtttttgtttgtttacccaggaggaaccatctatcaacctgtcctgaagggagttcctcctaggtctggtcggacctttgtatggtaattaagatttagatcccccattaggggattttcagtggttaatgttgtcatcttttttttttttttttaacagaatagccctatactttaagatttttaagttagtaagctaccttcttgctttttttttttttccttagggtacttctgaaccagtggggagtgctcacaatgaggttttctctaaaagttatttttctactttcttctgttagcaaagcagttgccactacagattaaatgcatgtaggccatctgcagattactaggttaaggatttttgataggaaggctacagcttgtcagtggcctcagtgctttcaggctatgcccttgtttacagtcacaacaaggtggtattggagagttgtagggtcatggagaagaccttcaattatcaattataggttttaaatttatcctggaatagagtacactttttttcttaactacttgtatatctctctttctctctttgattttctctctctttgactttcctttcacctctgtctctttctctctgcctctctttttttctctctctccttgactccaactttgtctctctgtctcttcctctctctctttgcctcttttcctctctgtctcttttttttctctctctctctctctctgctggtctttccttgcctctgccagccgcttatgctgctgttctctcaaccactgtgggaggggtggggggagtctaaaaccagctgtgacgaagtgtctatgtatgggaactggtctcggtgacctggctgacaggttaccttgtgacatacctctgaaacaagggacctctcaaggcttccttctgatggccaacccacctctaatgctggccagtctaagttacacaaagttttaagttttcctggtgtcatagtattccatagtctcctttaaatcctttcttgaaatttttcaacataattcctagtggggtgggcttactttgtgcctgatccatgcttccttgagacaaaacacctgctcacaccacacacacaccacaaaacaagaacaggtaaaaagggcacacacacacttttacagtttacaccaaaccagaatcaaaaccaaaatcagagtatcaggaaatccaatccaggtcaaaaccaaaaccaaagtatcaagcaatccaagtcaagtcaaaaacaaaaaccaaagtgctggtacaggcacaccatgggtgatcaggccatgcttccactcaaatggagtgggcaagttccaaagaccagtcttaccaaatttcatatgtccagactccaagtgccaattccttcctggtgttcagccactgtgttgatcctccgtgagggcctgccacatgcttctctagtaagatgtcccaccggggcaattgcctacctgggagcactctttggatctgcgtcactcaggctgattggagtcccccacagggatgctccacagggcaggcctcagtcacctaaggggctgcctcgacagtccaccaatcacctcacttcctggtcagagaaccaagaaatgtagcaggatgagccacagaaaagaacccctcagacactgagttgtggaaggaaagggctttactttattcagctgggagcatcggtggactcatatctccaaaaaccgagctccccgagtgagcaattactgtcccttttaagggcttacagctctaagggggtccaggtgagagggtcgtgattgattgagcaagcagggggtatgtgactgagggctgcatgcactggtaatcagaacaacagaacaggacagggattttcacagtgcttttccatacaatgtctggaatctatagataacataatcgattaggtcaggggccgatctttaactaccaggtccagggcacagtgccgggctgtctgcctgtggatttcatttcttccttttagtttttatttcttcttctatctttggaggcagaaattgggcataagacaatatgaggggtggtctcctcccttaaaaccaaaggcagatgctaaagcagtgcaaaactgttcatgtcacaatggaaacggagttgatgaaggagtctgggaaacgaatcttagtcacagcaagaaaggacataagtgaacatggcaaggtgctgacaattctggtctactggatcccaccatccctaggacagtcaccacccagcaagctacaactgcatcatttcctgtttgttccaaaatgaataaaggtgattcttatcacaagggcaaataaaaagtcattttttttttttttgagatggagtctctctcagtcacccaggctagagaacagtggtgcaatgttggctcactgcaagctctgcctcctgggttcacaccattctcgtgcctcagcctcctgagtagctgggattacaggcatctgccaccacgtccagctaatctttttgtatttttagtagagatggggtttcactgtgttagccaggatggtcttgatctcctgacctcgtgatccacccaccttggccttccaaagtgctgggattacaggtatgagccaccgtgcccagccaaaagtcattttttaaaactaaactgtcatggttttgtttactttttgaaagttcttataattttgaaagttcagttgacacttgtatgatttaggaagttttcaatagtcttacagtacttgaattgttcaaagtacagtatattttaaattaagaagagtaaactgtatgtgttatacatatttaaggctcagactcacaaataatgctcctgtttatgatttgaaaactttgaagtttggttttccatctgtacatacacagaacagtgtagcgtgcaaaaacatttgttctttaaagaggcagccacactttttgtctgtctggatatattttggactttgtatattaaatgtaacataaaaccgttcattttgttttagaaaatctaagattgatgtacacaaactttagaaattactgtagcaatcagcaaaccatgtatataatgtgaaactaatatatctatttttgatgtctaaatctttttgtagaaaaaattggtttctttaaaaatgtctccacaaactcaggcttattttataaaatggcaaaatagtaaagaaatgggtggtttggcatactatatgaatactggcactcaattaaaatacagaatatttttatcaaaattatttagaaagtagatttaaataatttggtttttcacttcagtgatagacattcacaaacatttaaaaaatcaaatctggctggatgcagtggctcacacctataatcccagcactttgggaggctgaggcagatggatcatgaggttaggagtttgagaccagtctggccaacatggtgaaaccccatctctactgaaaatacaaaaaattagccaggcatggtgacaggcacctgtaatcccagctactcaggaggctgaggcaggagaattgcttgaacctgggaagtggaggttgcagtgagccaagactgcaccactgcactccagcttgggcaacagagtgagactctatctcaaaaaaaccccgcaaatctattagtattaggtttgatttagtgttgatatatacataagatcaaaaatctgttaaaaataaatatttttcatcgctaatttggtgtgtttttttgtttgttgttttgttttgtttttgagatggagtctcactctgtcgcccaggctggagtgcagtggcttgatcttggctcactgcaagctctgcctcccaggttcacgccattctcctgcctcagcctcctgagtagctgggactacaggcgcctgccaccacgcccagcttatttttttgtatttttttagtagggacggggtttcaccgtgttagccaggctggtctcgatctcctgacctcgtgatctgcctgccttggcctcccaaagtgctgggattacaggcgtgagccaccacgcctggcctaatttggtgtttttaaatacccagatgtcccattttaatcagattaagtctggggaaagttgactaatcttatttaattttttgtacagtatgttcaaaatgttctggtttaacctaatagcaattaatgatgagtaaacaatttttctttcaaatctcaggcctgttaaattgctgaagctatttttaatttaaaaattttgggccgagcctggtggctcccgcctgtaatcccagcactttgggaggccaaggcaggtggatcacttgaggtcaggagttcaagagcagcctggccaacatggtggaaccctgactctactaaaaatacaaaaaattagccaggcatggtagcatgtgcctgtaatcccagctactcgagagtctgaggcacaagaattgcttgaactcaggaggtggaggttgcagtgagccgagattgtgccactggactccaggctgggcgacagagcaagactctgtctcaaaaaaaaaaaaaaaagtctttaatgttgtttaaagggacttaggtctactctaatcttctcaacctgttaatcagtgtcaggtgccaaattccaatttattttcagggtgcctgaatgacttttctttgcatagtctttgaattaaatttccattaataaggacagatttcagtacatttaaccagttgcttttagtacctccaaaggtagtatacaaagaattctcatgttattttctaagaaaacagattctactgttacctgagaaatcaactggaaggcatttttataaccttgcaccacataaaaaaatgcaatgtagtactaataaatgcaggctacatcacacaaaaaatggtaatcaagaataccactttcaatatttaaatatttgaaattttggtaaaaagtgtggtaaagtataacttttagtaagctttgtgcagctaaacatcagcataaagtaggaaaagatctttaaaaatgaaaacaaatgaaaaccgacaccaaaaaaactaacatccaccattgcatacatattgatctctgtttcaaaaaagtctgaagcagaacgtttggtgaacttcatgcagttattttcactacactggaatactgataaaatcatttatatttaatttgagtaaagcatgttcacatcttaaaaacactgctttgtagctgggcgtggtggctcacatctgtaatcccagcactttgggaggctgaggtgggcagattacgaggtcaagagttcaagaccattctggccaacatggtgaaacccatctctactaaaaatgcagaaattagtcatgtgcggtggcttgtgcctgtagtcccagctactcaggaggctgagtcaggagaatcgcttgaacccaggaggtggaggttgcagtgagccaagatctcaccactgcactccagcctgggtgacagagtgagaccccatattaaaaaaagatactgctttgtactatgaataataaatgtaaaatctttttatttacttatttatttttaatttattttgagacattcttgctctgtagcccaggctggagtgcagtggcagtgatctcggctcactgcaacctctgcctcagcctccccagcagctgggactacaggcacacaccaccacacccggctaatttttgtatttttagtagagacgggtttcaccatgttggtcaggttggtgtcaaactcctgacctcctaatccacctgcctcagcctcccaaagtgctggaattacaggtgtgagccatcgcgcctggctataaagtctttatactcaagagaatcctgattctcaactcaacatatatgggcaaccctttcctctggtgtctttaaacggaagcctcattaaggctcaaatatggagtgaaagggactcaataacagcatttgaagcaaaaaggatgaggtaggatggtcagctctgaggctcagggattgcctgggggactccagtatgatgtaactatgaagcttactgcatacaagtaaacattaacagccgaaaacaccatggcttgaaattggtgagatagaatctctgaaatcataaacagttgcaccaaaaagattgacccagagtgacaagtaactaaggattactaagggggagtgtttacaagcacgtaagtttttgttccaaatcttattacagtagcaatatgcttttctgtaatgtcagcttccccaagctacagatgctatagacaaactacaagtgcctaatatgttgtttgcagtcagtgtcttaatttagaaaactttcaataatttcatgaatttcattgaaatctgtttcatgtataaatctcactgaaaggcattattcagtagctatttccctcagtattttggggaattttctattgcttgatttcaaaccaactttacttgaatcctagtcatttctaaagccccagatgtaatagcagaaagacagcagaaatgatgccaagttactccaaacagttcacgtctaatatatttggttccccaaatgaaccagaaaccacacaagctaaacaacagtgtatttgaaattcaacctaaattcaacagtaacagtcaaaaccctatgcaaatatcagcacagtcacaatgtagaaacccttagtcttttattccagagaaaataaaaaaattcttactttggcattttctggaaaggataaatacattaaacatgacaaaatataccaactcacataatatatttgaaatgtgaatatttattcttaaatatttactgtaatatttaaacaagactttcagtgaaaaatacagctaccatgtgttaaaacagccctgagtgagatagtattttttattaataatgaagattgaagcttcagaaatgcaaaataaataatcctgggcacacagctagaggaaggtaacttaaagtatttgaaagatgttctctaagactctaaaattattttgttttagcttatataaaaaatgattaagcatttttaattttcaaaaaatgtaagtgcattctgtcaggtttttctgaagaatttaaatagaatagagtaaaattatacttatcaaaaggtaaacttttctattaatagagcagtttaattttcacaccctgagtaaaatcttacaaaatttattgcaatttaatcagaaacttctttctcacactgggagagatgacacaaagatgcagctttcatgttgggtgagagaagaaatgatcaccggaggtagataattgttgtttcactaatcaatgttgatttttattgctattttgtctcaaattatgttaataatgaagtaatggccttgatccaagaattttttttttttttttttgagatggagtctcactctgtcgcccaagctggagtgcagtagcgcgatctcggttcactgcaaactccacctcccgggttcaagcgattctcctgcctcagcctccctagtagctgggactacacgtgcatgctaccacgcccggctaattttctgtatttttagtagagacagggtttcaccatgttagccaacatggtctcaatctcccgacctcgtgatccaccggcctcggcttcccaaagtgctggattacaggcgtgagctaccgcgcccggcccccaagaacttttttaacaatttatttttaaaattagccaaaatattatccataaggcagaaaaatgaagatattaacagtcataatttgtattttaaattaaaatacttttagaaataaaaaagaaaaaatatataaaaacaaatgaaagagaaggaagtaggttactcacaatagctaagatagagaatcaacctaagtgtccatcaacaggtgaatggatgaagaaaatttcgtgtatttacacaatggactgctattcagcccttaaaaataaagaaatcttgttatttgcaacaacgttgatgaatctggaggacattaggctaagtaaaaagagccggcacaaagaaaaaagggaaacaaaaacataccacatgatctcgttttttttttctcaaaaaagtttcaattttatttagctttgtgactttgtacttgtgccttcaacactttcacaacgattttctgctccccgataaggaaagcacgcttgatcctgccacgaacacatttagcacacatggaaccaccataggccctgctgacatgtttctttctttttgacaatttcataagaactttaggtcttacagcacgaacccctcgaagtcttcctgggcacatgccacttgcagatcttggtgctttcccaaccttcttggtataaaggtaaacaattctattaccaggggttcggggcagtctagttttgttggacgctgtattgtaggaaagcctacattggtatgtcaaacgctggaccattctgagtgcctacagacaacgtcactggaagagccacatgatctcatttctctgtaaagtagaaaaaaattctaattcggccgggcgcagtggctcacctgtaatcccagcactttgggaggctgaggtgggtggatcgcctgaggtcaggagttcaagaacagtctggccaacatggtgaaaccccgtctctactaaaaatacaaaaattagctgggcggggtggtgggcgcctgtagttccagctacttgggaggctgaggcaggagaatcccttgaaccagggaggcggaggttgtggtgagccgagatcactcaattgcactccagcctgggcaacagagcgaaactctgtccccccgccccgccctcctcccgcctcaaaaaaaggccgggcatggtggctcacgactgtaatcccagaactttgggaagccaaggcgggcagatcacctgaggttgggggttcgagaccagcctgaccaacatggagaaaccccatctcttctaaaaatacaaaattagccaggcgtggtggcgcatgactcccagctactcgggaggctgaggcagaatagcttgaacccaggaggcagaggttgccgtgagcagagatcaccccattgcactccagcctgggtgagcagagcaaaactccgtcttgaaaaataaaaaaaaaaatttaactcatagaagcagagaatagaatgatgattggctgggggtggagatattggtcaaaggtaatgggtctttcctatatctcttactttaataaataagttattcttttctcagttttgattcaccagggaattgtgtcatatcctgaagaatcaaaacgggaagaataatatattaattaaagcaatgcaagttgtatactaaaatttcagaggcttagtaaaataatatattttatggtcacataacaatttttttctcattaagaggacttctatatgatctttcagggatcatatcttctttcatcttctttctgcgtccttctctttcttcagccaatggatgaaaaaatagatgcagagaagacacatttggttcttattcacacttcacttccactcactattagtcagtgtggatagagccgagaatagcagtttcctggcaggacagccacttctcagcaataaacaacacactgaaagaaaagtatatatctttcatcaaaagctaatggattttaagcaaaataagcatatgcatcaataataaaatgcttgtggtaaaataaagatgaattttattgatttctattgagttccggtaatatttgaccaaaagctagcaaatatacagcaaaaaaaggaatattatttgaaataagaatattgtgaattaagttatcctgtcaacagaagtaaaaatattatggcatcatactaataatttcatctatagttgtacaacatcaaatgctttttattaaaaactgtattttatatcaatattccatttatatcaccctcgttcactatttcaatgccgtctccactttatatcagtggaaacaggccggcctgctcaaggagagcacgtggtgccattgctatgttaatgacgatgatgaagagaacttgtttgggtggtgctcaaagtactggttttctgtttttctctacatttacaaataaaataaaattcttagctaaaaagactctatctcattgaaatatgttttatgaaatttggttgacatttaagtgccactgatttatctggaatattgaaatttttatgaatccaaattgagtactataagcaatcttttactaaaagcctttgtgagtcagaataagattcattttttttttgttttttttttttttgagatggtgtctggctctgtcgccaggctggagtgcagtgacacaatctcagttcactgcaaactctgcctcccaggttcaagcgattctcctgcctcagcctcccaagtagctgggactacaggtgcgcatcaccatgccaagctaatttttctatttttagtagagacggggtttcaccttgttggccagtatggtctccatctcttgacctcatgatctgcatgcctaggcctcccaaagtgctgggatcactgcaagctccgcctcccgggttcacaccgttctcctgcctcagcctcccgagtagctgggactacaggcatgcgccatcacgcccagctaattttttgtattttttttagtagagactgggtttcaccatgttggccaggatggtcttgatctcttgacctcgtgatcagcccgccttggcctcccaaagtgctgggattacaagcctgagccaccatgcctggctcaaatggtttttctaattgttacttttatcatgttaatctaagagaaactatgtgcatactgattatgcattcaagacatattaatattaaagatctgcccacctaggcctcccaaagtactaggattataggcgtgagccaccgcgcccgaccgatcatgaaatttttataatatgaaagaaatgtgttaatcatgttcctagtaatcactttaaacacagcattatcagttcccagtattcaccctgagtcactcaggggaaattgtattaaacaattaatattaaagtgtttaaagtttaatattatatcacagcatggaatcctctaaaatgagttcattattaataaattcattatgttttcgaggtttttcaattgtgaaaacaaataataagatatgctttttcatgataagctcaattctaggaagttacccactggtctccacgttatttctgtaatgtgtagtgtaacactgggccaccagaatggtgcagatatgctgatttaatgagaataaaaatgagtacagcctccttggctgactattgctatcccagaggctgatcattcactacaacttagtaaatgctgctccatcatgccagtgagccctttcaaccaggttgcccttttcctcccattgatttgctcatgttgtggtctcctctctttatcttaagctatcccagatgagaggtgattatttcttgaatgaaggatatcccctttttatctctgtcatgagatcctcccttccttcctactggaagcaacatgtgggaggcaggaatgatgataatatacaagtatattttcttccatgtggtcaccataagcagcttacatgttccacgtagaagtcactcacttccaggccagcagggtggtttttctacgatgtgtctctttctcataaaagcacctctgactaagtttagcccaatcaggataatcttccttttgatgaacagaacatattagcagcctaatttcatgagtgattttccaccacagtaagtcacattttttttacactccaaaggagaggattacacagctggtgtgcaacagactgggaatcctggtgatcatcttagaattttgcctacccacctgcatagactattaaagtagttttgaagtttcttttgttatctaagtaaacaaagatatcatttgcaaataataattaactaccttcccattttattacaaatattaacatcttttttctggcttatttctttttcatgtaccattttatacatttacactcatatataacaatgaaaatgtattcaactattcaattgaatacaattgaagcatatcaatcattttattaaaaatgattgttaggctgggtgcagtggctcacgcctgtaatgccagcactttcggaggccaaggtgagtggatcatctgaggtcaggagttcaagaacagcctggccaaaatgggaaaaccatgtttctactaaaaaatagaaaaattagccaggcctggtggcgggcacctgtagccccagctacttgggatgttgaggcaggagaatcacttgaacctgggaggcagaggttgcagtgagccgagatcatgccactgcactccagcctgggtgacagagtgagtctcaaaaaaaaaaaaaaaaagtataaatacacaatggaatactattcagccataaaaagggataaatccagccctttaaaacaatatagataaatttggaagacattatgctagctgaaataagactgacacaaaaagacaaatactgcatgatctcatttacatctagaatttaataaattctacctcaaaaaagcagaaagtggaataatggttactggaagctgggtgtggtgggaaggaaataggaagttgttgatcaaagggtacaaggttttaaatagaaaggataagtagatttccagatctattgcacagcaggatgatgacagtaaactataaagttctttttctttcttgtttctttctttctttttctttctttcttttctttcccttccttcccttttctttctttctttttttttttttttttttttttgacggagtttcgctcttgttgcccaggctggagtgcaatggcacgatctcggctcaccgtaacctccacctcctgggttcaatcgattctcctgctgtagcctcccgactagctggaattacaggcatgcaccaccatgcctggctaattttgtatttttagtagggacggggtttctccatgttggtcaggctgagtcttgaactcccaacctcaggtgatccggctgcccccctcggcctctcaaagtgctgggattacacaggcatgagctacggcgcctggccaagtactttatttcaaaataactaaatttcaaatgtatcaccacaaaaaaatgattggtaagcaagttgatatgttattaaactcgacttatatcatatatatgcatatattgaaacatcacattttacgccataaattatacaactctgatttgccaatcaaaaatactattaatattgggtttttttaaatgagagaaactttaagaaattgcaccagagaaaaaagtgttcattcattttaaaatttcagaaaacatatacatattttatttcaatggcttgctcagttagtgatgtaagttagtaaacttttaaaactatgaatagtctgaaccaacactcaaataaagtatgttgatttttaatattcaaaataatataccttaaaagacagactctaaacaactggagtaaaacctctctaaatttgtaaataaataatttttttcacttgttagacaaaaaaagttctttaaatatatatattttaaatacatttaggccaggtgtggtggctcacgtctgtaatcgcagcactttgggaggccgaggtgggtggatagcctgaggtgaggagtttgagaccagcctggccaacatggtgaaaccctgtctctactaaaaatacaaatagtagccaggtgtgttggcgggtgcctgtaatcccagctactcgggaggctgaggcaggagaattgcttaaacctgggaggtggaggttgcagtgtgtcgagatcacaccactgcattccagcctgggtgacagggtgagactctgtctctaaataaataaacgaataaataaataaatttaaccaaataaacataaatcacaagtttattaaacaagtaatgaaacaatttgcttcattctctaattataaaactgacactcagcatttaagtggttgtatgtctagtgttactagtgtactagacagcaattctcaatgagacattttttcataatatttatatccatgctgtatgtgaatatatgggaatttgccaaggatagtgttagaaacattcaactactattatagccccagatggaagaattagaatgaacatgggttacaagccagtggtatggccatcttgttttcaggcttaacatttgtcatgatctaacagaatcaacaaataagagctaataaacttcctgtacactagctatgtgctgggcatttttatggctcctttatttgcattaactgctttaattttaccaaaaccctaggatttaggccctattatcctcactgtacagctgaagagtcatgcacagagaggcaagaaactgtgtttaggtcatataaccgttaagtggccgaactgggatgcagtcaggaacaaccaaacactgagtttcaattttaaccattatgctcaaccccacctcaaccaatgtttgtttttattcttgacctaatattttggctttaaattttaaatttaatagaaatacataggaatttaaaaaccacttctttttaccataggtagtatttacaaatcgatttttggtttaaagtactcattactggccggtcacagtggctcacacctgtaatcccagcattttgggaggcagacgcagacagatcacttgaggtcaggagtttgagaccagcctggccaacgtggtaaaaccccgtctactaaaaatacaaaaaattagctgggcgtggtggcgggcgcctgtaatcccagctacccaggaggctgaggcaggagaattgcttgagcccaggaggtggagactgcagtgagctgagataccgccactgcactccagcctgggaaacaaagcgagactccatctcaaaaaaattgctaagcttaacacactttggtaaatagatactaacaatggttttcctctcatgatttctaggagccaccaattttacttttgaaatatattgaatttttgtattaaaagcaagaatgagcctattattatataatttgtggtatccatgtacattattgtatattgagtgatctacagtttctgaaagtttcagaaactgtataactttttttgattgaataatttaagaatattaagtcttctcagtgaataaaatagattgaaattactgattagtcacttataatgcagcattaaatgttatttaataaatacttgaagctttttaaactcattttaacaacttctattgctatttcacttttattagaaagaaatattaacatttacattacttacaggcctctgaattttattcaaatctaaacatagtgctaattttaggagatctgtatgattaggattatggaaagcctttcctttatttacaagtagaagataaataactgctttccagtaaacacaaagaagcaaatttgattcacaaaagctattaaaatattaatactatcatctagatgaaacttttaggtatctgcattttcaagttgtttaacacataacaattcagaaactagtttttatgaaatataaataactaaaaatataaagttatcaatttttttcagttttgaaatactgtcattatttccagttgacataacattaaatttcagagctgtggctgttgaaactaggaagtcatggttgactctgctttacttgctgccttcttatttcacacaaacacagcagcccaaagatcagaaatgttacacctttattgtaaacacagcagtagctttctagggagaatatatatgtgtgtgcatgttaacttgaaattcacagcttcttttgttgaagtacagacttctatatgaaaaataatgggctgggtgcagtggctcatgcctgtaatcccagtaatttgggaagccgaggcaggtggatcacctgaagtcaggaattcgagaccagcctgaacaacatggtgaaaccctgtctctactgaaaatacaaaaattagccgggtatggtggtgagcacctgtaatcctagctacttgggaggctgatgcaggagaattgcttgaacccaggaggtggaggttgcagtgagctgagatcatgttattgcactccaacctgggtgacaagagcgaaattccaactcataaaaagaaaaaagaaaaagaatgaagcaaatatagaatcaaaaaaattctaaaaattccttctgaccgattattgttttttcctgagaatgattgtgatggaatggttgcagcagtgtggttttaacacacaatctctgtttcatcattcttcagctatggtcataagacttctatgcttttttaaagaaaaatattttctcttgttaactcagtaatttacatgatcttcacagcctcatattttcaaaaatagttcattctttaaaaaaagaaaagtaattaaatcacctaccacttttcctcaaaaagagtaacaaattaatcatatagtctagtgtatagttaatacataaaaaatacaggtgtagagtcatcttttttaaaattatacttcaagttctatggtacgcgtgcatgtttgttacatatgtatacatgtgccatgttggtgtgctgcacccattaacttgtcatttacattaggtatatctcctaatgctatacctcccccttccccacaccccacaacagaccccggtgtgtgatgttccccactgtgtccaagtgttctcattcttcaattcccacctatgagtgagaacatgcggtgcttggatttctgtccttgtgattgtttgctcagaatgatggtttccagcttcatccatgtccctacaatggacatgacctcatccatttttatggctgcacagtattccatggtgtgtatgtgccacattttcttaattcagtctacaattgatggacatttggattggttccaactctttgctattgtgaatagtgctgcaataagcatacttgtgcatgtgtctttatagcagcatgatttataatcctttgggtatatacctagtaatgggatggctgggtcaaatggtagttctagttctagatccttgaggaatcaccacactgtcatctgcaatggttgaactagtttacagtcccaccaccagtgtaaaagtgttcctatttctccacagcctctccagcacctgttgtttcctgaccttatcattattatcattatactttaagttctatggtacatgtgcacaatatggtttgttacatatgtataaatgtgccatgttggcatgctgcaccagttaactcatcatttacattaggtatatctcctaatgctatccctcccagctcccatcaccccacgacaggctccagtgtgtgatgttccccaccctgtgtccaagtgttctcattcttcaattcccacctataagtgagaacatgtggtgtttggttttctgtccttctgatagtttgctcagaatggtttccagcttcatccatgtccctataaaggacatgaacgtgtccttttttatggctgcatagtattccatggtgtatatgtgccacattttcttaatccagtctatcattgatggacatctggattggctccaagtctttgctgttgtgaatagtgccgcaatacacatatgtgtgcatgtgtctttataccagcatgatttataatcctttgggtatatacccagtaatgggatgacttggtcaaatggtagttctagttctagatccttgaggaatcgccacactgtcttccacaatggttgaactagtttacactcccaccaacaccgaaaagtgttcctaattctccacatcctctccagcacctgttgtttcctgatattattattattatattttaaattccatggtacatgtgcacaacgtgcaggtttgttacatatgtatacatgtgccatgttggcatgctgcacccattaactcgtcatttacattaggtacatctcctaatgctatgcctcgacactcccccctccccatgacaggccacggtgtgtgacatcccccatcctgtgtccaagtgttcacattgttcaattcccacctatgagtgagaacatgtggtgtttggttttctgtccttgcaacagtttgctgagaatgatgtttccagcttcatccatgtccctacaaatgacatgaactcatccttttttatggctgcagagtattccatggtgtatatgtgccacattttcttaatccagtctatcattgatggacatatgggttggttccaagtctttgctattgtgaatagtgccacaataaacatatgtgtgcatgtgtctttataccagcatgatttataatcctttgggtatatacccagtaatgggatggctgggtcaaatggtaattgaggaatcgcaacactgtcttctgcaatggttgaactagtttacactcccaccaatagtgtaaaagtgttcctatttctccacatcctctccagcacctgtcttttcctgactttttaatgattgccattctaactggtgtgagatggtatctcattgtggttttgatttgcatttctctggtggccagtgatgatgagcattttttcatgtgtctgttggctgcataaatgtcttcttctgaaaagtgtctgttcatgtccttcacccactttttgatggggttgattttttttcttgtaaatttaagttctttgtagattctggatattagccctttgtcagatgagtagattgtaaaaattttctcccattctgtaagctgcctgttcactctgatggtgttttcttttgctgtgcagaagctctttagtttaattagatcccatttgtcaattttggcttttgttgctattgcttttggtgttttggtcatgaagtccttgcccatgcccatgtcctgaatggtattacctaggtttttctctagggtttttatggttttacgtctaacatttaagtctttaatccatcttgaattatttgttgtataaggtgtaaggaagggatccagtttcagctttctacatatggctagccagttttcccagcaccatttattaaatagggaatgctttccctacttcttgttttcatcaggtttgtcaaagatcagacgcttgtgatgtgtggtattatttctgaaggctctgttctgttccattggtctatatctctgttttggtactagtaccttgttgttttggttactgtagccttgtagtatagtttgatgtcaggtagcatgatgcctccagctttgttcttttggcttaggattgtcttggcaatgtgggctctattttggttccatatgaactttaaagtagttttttccaattctgtgcagaaagtcattggtagcttgatgggtatggcattgaatctataaattactttgggcagtatggccattttcacgatattgattcttcctatccatgagcctagaatgttcttccatttgtttgtgtcctcttttatttcattgagcagtggtttgtagttttccttgaagaggtccttcacatcccctgtaagttggattcctaggtattttattccctttgaagcaattgtgaatgagatttcactcatgatttggctgttcgtctgttaatggtgtataggaatgcttgtgatttctgtacattagtatcctgagactctgctgaagttgcttatcagcttaaggagattttgggctgagaccaatatacaatcatgtcatctgcaaacagggacaatttgacttccttgtttcctatttgaatacacattatttctttctcttgcctgattgcccaggccagaaattccaacactaagctgaataagagtggtgagagagggcattcctgtcttgtgccagttttcaaagggaatgcttccagtttttgcccattcagtatgatattggctgtgggtttgtcacaaatagctcttattttgagatacgtcccatcaatacctagttgattgagagtttttagcatgaagggctgttgaattttgtcaaaagtcttttctgcatgtattgagataatcatgtggtttttgtctttggttctgtttatatgatggattacatttattgatttacatatgatgaaccagccttgcatcccagggatgaaactaacttgatcgtggtggataagctttttgatgtgctgctggattcgtttagccagtattttattgaggatttttgcatcgatgttcatcagggataatggtctaaattcttttttgttgtgtctgtcaggctttggtatcaggatgctgctgacctcataaaatgagttagggaggattccctctttttctattgattggaacagtttcagaaggaatggtaccagctcctctttgtacctctggtagaattcagctgtgaatccatctggtcctggacttttttttattggtaggctattaattattgcctcaatttcagagccagttattagtctactcagggattcaacttcttcctggtttagtcttgggagggtgcatgtgtccaggaatttatccatttcttctagattttctagtttatttgtgtagaggtgttcatagtattctctgatggtagtttgtatttctgtgggatctgtggtgatatcgcctttatcatcttttattgcatctactctcttttcttattagtcttgctagcggtctatcaattttgttgatcttttcaaaaaaccagctcctggattcattgatttttttaaagggttttttgtgtctctatctcctttaattctgctctgatcttagttctttcttgacttctgctaacttttgaatgtgtttgctcttttttttttttttgagatggagtctcgctctgtcgccaaggttggagtgcagtggcacaatctcagctcactacaagctccacctcctgggttcacaccattgtcctgcctcagcctcccaagtagctgggaatacaggcgcctgccaccacgtatggctaatttttttttttttttgtatttttagtagagacggggtttcaccgtcttagccaggatggtctcgatctcctgatctcatgatctgcctgcttcggcctcccaaagtgctgggattacaggcatgagccactgcgcccggccgcttctctagttcttttaattgtgacattagggtgtcaattttagatctttcctgctttctcttgtgggcatttagttctataaatttccctctacacactgctttaaatgtgacccagagattctggtctgctgtgtctttgttctcgtttgtttcaaagaacatctttatttctgcctaaattttgttatgtacccagcagtcattcaggagcaggttgttcagtttccatgtagttgagcagttttaagtgagtttcttaatcctgagttctagtttgattgcactgtggtctgagagacagtttgttataatttctattcttttacatttgctgaggagtgctttacttccaactatgtggtcagttttggaataagtgtgacgtagtgttgagaagaatgtatattccgttgatttggggcggagagttctgtagatgtctattaggtatgcttggtggagagctgagttcaattcctggatatccttgttaactttctgtctcattgatctgtctaatgtcaacaggggggtgttaaagactcccattattgtgtgggagtctaagtctctttgtaggtctctaaggacttgctttatgaatatgggtgctcctgtattgggtgcatatatatttatgatagttagctcttctaattgcattgatccctttaccattatgtaatggccttctttgtctctattgctctttgttggtttaaagtctgtttcatcagagactaggattgcaacccctgctttttttgtttgttttccatttgcttggtagatcttcctccatccctttattttgagcctatgtgtgtctctgcaggtgagatgggtctcctgaatacagcacactgatgggtcttgactctttatccaatctgccagtctgtgtcttttaattggggcatttatcccatttacatttaaggttaatattgtaatttgatcctgtcattatgatgttagctggttattttgctggttagttgatgcagtttctgcctagcattgatggtctttacaattcggcatgtttttgcagtggctgataccggttgttcctttccatgtttagtgcttcattcaggagctcttgtaaggcaggcctggtagcgacaaaatctctcagcatttgtttgtctgtaaaggattttatttctccttcacttatgaagcttagcttggctggatatgaaattctgggctgaaaattcttttgagaatgttcagtcaggcgcggtggctcaagcgtgtaatcccagcactatggaaggctgaggtgggtggatcatgaggtcaagagattgagaccatcctggctaacacagtgaaaccccatctctactaaaaatacaaaaaattagctgggcatggtggtgggcgcctgtagtcccacctactcaggaggctgaggcagaagaatggcatgaacccgggaggcggatcttgcagtgagccgagatcgcaccactgcactccagcctgggcaacagagcaagattccgtctcaaaaaaaaaaaaaaaaaaaaatagaatgttgaatattggcccccagtctcttctggcttgtagagtttctgccgagagatccactgttagtctgatgggcttccctttgtgggtaagctgacctttctctctggctgcccttaacattttttcctctatttcaactttggcgaacccgacaattatttgtcttggagttgctcttcttgaggagtatctttctggtgttctctgtatttcctgaatttgaatgttggcctgccttgctaggttggggaagttctcctggataatatcctgaagagtgctttccaacttggttccattctctccgtcactttcaggtacaccaatcagacgtagatttggtcttttcacatagtccttatttcttggaggctttgttcatttctttttactcttttttctctaaatttctcacttcatttcattcatttgatctttgatcactgatactttcttctacttgatcaaatcagctactgaagcttgtgcatgtgtcagtcacgtagttctcttgccatggttttcagctccatcaggtcatttaaggtcttctctatgctgtttattctagttagccatttgtctaatcttttttcaaggtttttagcttctttgtgatgggttgaaacatcctcctttagctcaaagtttattactacccatcgtctgaagtcttcttctctcaactcgtgaaagtcattctccatccaactttgttccgttgctggcaaggagctgctttcctttggaggagaagaggcactgtggtttttagaattttcagcttttctgctctggtttctccccatctttgtgggttttatctacctttggtctttgatgatggtgacgtacagatggggttttggtgtggatgtcctttctgtttgttagttttccttctaatagtcaggaccctcagctgcaggtctgttggagtttgcctgggtatcaccagcggaggctgcagaacagcaaatattgcagaatagcaaacgttgctgcctgatccttcctctggaagcttcgtctcagaggggcacccggccatataagctgtcagtcagtccctactgggaggtgttgcctagttaggctacttgggggtcaaggacccacttgaggaggcagtctgtccattctcagatctcaaactctgtgctgggagaaccactactctcttcaaagctgtcagacagggacgtttaagtctgcagaagtttctgctgccttttttttggctatgccttggccccagaggtgggagtctacagaggcaggcaggcctccttgagctgcaataggctccacccagtttgagcttcccagccactttacgtactgaagcctcagcaacgacggatgccccttccccagcctcactacagccttgcagtttgatctgacttctgtgctagcagtgagcgaggcttcgtgggcacaggaccctccaagccatacgtgggatataatctcctggtgtgccatttgctaagaccattggaaaagcacagtattagggtaggagtgtcccaattttccacataccatctgtcatggcttcccttggctaggaaagggaattccccaaccccttgcgcttcctgggtgaggtgatgccccgccctgcttcggctcactctccgtgggctgcacccactgtccaacaagccccagtgagatgaacccagtacctcagttggaaatgcagaaaatcacccgtcttctgtgtcactcaagctgggagctgtagactggagctgttcctatttggccatcttggaacctcccttaaatccagagtcatctattttaactgcacacttgggaataaaagacatcttgggctataggccaagagctttcagagaagatagcttacaaaatgtggggcgactgggtatagaaacatttacccctatgccttaaggagtaaataattctttcactgctaattccaactattaacttggaactacagaaatataacatttcattgcaccacaaaacatcttgttatttctattttagattcagggaatacacctgcagattggtagcataggtatactgcatggtgttgaagtctggacacttttaactatcccattgcccaagcagtgtacactacacatggtaagtagtttttcagtgtttgtctccctttcttcttccatctttttggaattcccagtgtttactgttttcatctttgtttccatgtgcacccagtgtttacctcccacataaaagtgagaacatgtggtatttgttttactgatctctgttaatttgcttacattaatggccttctgctgcattcatgttgccacaaaggacaatatttcattcttttctgtgactgcatagtattgcagtctgtaagtacctcatttttcttatgcaatctaagatttataggcacccatttctcctgaagtcaggatgaagttgaaacagctgtttctccacaacttcaacatgtaattttttgacttataacagccattctaactggtgtgaaatggtatcatattgtcattttgatttacatctctgatgattacagatgttaagcattttttgaatgtttattggcaactcttatgtcttcctttgagaagtgtcaatattttctgctttgtcaaattaaatttcttatagattcgatatattaatcagttgtatgcactttgcaaatattttatttcatattgtaaggtgtctgtttcctttgttgatagtttctttggctgtgcagaagctctttagtttaattagatgcaaatttttgatttttattgttgttgcacttttaagatgttattcataaattcattccagaggccagtgtctagaacagtcctttctaaatgttcttctaggatttgtgtagcttgaagactcacagataagtccttaatctatcttgacttgcattttctatatggaaagaggtaggagtccacttttttctgcacataaccagttttccctgtaccatttattattattattacttttgaaacaaagtctcactctgtcacccaggctggagtgcagtggcgccatcttggctcactgcaatctccccctcccaggttcaagtgattcttctgcctcagcctcctgagtagctgggactacaggtgcctgctaccacgcctggctaatttttgtatttttagtagacagggtttcaccctgttggccaggctggcctagaactcctgacctcgtggtccaccagcctcagcctcccaaagttctgggattacaggtgtgagtcactgcatccagcccccacttattaaatagagagttattttccctttgttaatttctgtgggctttgtgaaaattaacttggttgtaaaagtgtagatttcagggctttctcttctccattgatctaaatgtatattttcataccagaaccatgtaatactggttactgtagcttgtagtacaattttaaatcaggtaataggaggcctctggtttttgtttttttttttttttctgacgttgccttgactatttgggcttttattctttcacataaattagttttctttgctgggcgcggtggctcatgcctgaaatcccagcactttgggaggccgaggctggcggatcacgaggagtttgagaccagcctggccaacatggtgaaactctgtctctacaaaaatacaaaaattagccaggcatgatggcgggtgcctacaatccccgctatttgggaggctgaggcagaactgcttgaacctggaagatgtaggttgcagtgagcccagattgtgacactgtactccagcctgggtgacagtgaggctctgtcttaaaaaataataatttaatatggttcacttaccataaactctctaaaattctaatttctatattttctaggaaattttatatttgtcacactttggataagaatctagtaagactctaacaatattttttctttttacaaagaaagcagcacaacactaactgatttaatcctctcacctgtggacatgtatgccttttatcttaattaactgatctgaaagttatattgataagcaaactctccagttaaaaccattttttcagttcattaaaaaataccaaacttctcatcaaaacccacaaaataccatgtgagatgacatggcatgaaaaaaacagtgggataactgcagccagtaacacagaaaaagaagaagggctatgatgtatacgtgggtggaatacacataaaaagacaaagcttaagataattagaaaataaatgaagcagaatttctttttaaattcagtaaaattcagctttgcagcctgaaaaaaaataaaatgtcctctccacatgaagaatcaatgttatttgtttacctttgatattttccacctgacttgcagtttgcaactttcacagaagtatttatgccttattatggagcatctgttatacagcaagcactgtcatgtttgtttgctacatttatgtataaaaacattctcatgacttatgaagtttccctagtacttacctgaacaaattgcctaacgaataaatttacttatatccatcacaaaaagtgaaaaaaaaataacataagaaaagtaggcttatatagggttctccaattaaatgaaatgttctaactaaataaaatataatttaatgcactaattttagaattacagctaaaaattattttgtgtacatgactaagtttattttattttgaagtggagtcttgctctgtcacccaggctggagtgcagtggcacaatcttggctcactgtgacctctgtctcccgggttaaagctattctcctgcctcagcctcccagtagctgggattacaggagcatgccaccatgcctggctaatttttgttatttttggtagagatgaggtttcaccatgttggccaggttgatcttgaactcctgacctcaagtgatccacccacctcggcctcccaaagtgttgggattacaggtgtgagccactgcacccagcccataactaaatttcattaaaatcattcttataatcacagagcagctcacaaaatgaatacctcataaactataaaacaacaaatatatatcagaaacaagaaatttatgggcctagcatgagtaccagacaagtgaaaacaagagaatttgaatggcaagattctgaaccataagccgtaaaattatacagtaaaattcaatacaaaccagagtatagatttgcattcatttttgaggatttttgttttctagaaaagtagacacctgaccaggtgtagtggctcacgcctgtaatcctagtactttggaagattgaggcgggtggatcacctgaggtcaggagttcaagactagcctgaccaaaatgatgaaaccccatctgtactaaaaatacaaaaattatctgggcatggtggcctgcgcctgtagtccttcctactagggaggctgaaacaggagaactgcttgaacccaggaggcagagttacagtgagcggaggtcacgccactgcactccagcctaggcaacagagtgagattctgtctcaaaaaaaaagaaaagaaaagaaaaagaaaagaaaattagacaccttattaaaatgatgtcttgttccaatattattctgaaaatagttacaaactcatactcaaacacacttaatccataatcttcttacacctaaggtttatatttagactaatagatgtgtacatttaactctatgtaaatcaaaactaaaagcctgtatctgtttgcaagcagagaggccacatattcaaagaaaaatatacaagaaattatttttaagtatttattcaggactcagaaatgtgtaaattttatacgtctatataatttttattattataaaaataaccctgtagtcaataataatcgtatattttaaaaaaactaaaactgtacaattgaactgttcataatacaaaaaataaatactaaaggtgatggatacctcatttaccctaatgtgattattatatattgtatgcctcttatcagaatatgccatatataacataaatattatgtgcctgaaaaaactaacaaaagtaaatttaaatgggaaaaaataaataaaagttttacctacagaaacaacattccttatttgcagtttaaagccactggaaaaaagattagtactacagatgttagtgcattcttttaccaaatagtgtattgttaccaccatttattttatttacttatttattttttgagagggagtctcactttgtcacccaggatggagtgccatggcatgatctcggctcaccgcaacctctgcctcctgggttcaagtgattctcctgcctcagcctcccgagtagctgggattacaggcatgcgccaccatgcctggctaattttgtatttttagtagagatggcgtttctccatgtgggtcaggctggtcttgaactcctgacctcaggtgatccgcccgcctttgcctcccaaagtgctgggattacaggcgtgagccaccgcgcctggccttgctaccaccttttacctacacccttgagtaaggtggactaggttaaagtaagtggaataatgtgacttgattgaatgcacaatatttaaactgtttaaaatgttgaattaagaaattaagttcacacataatctaaaatttttaacatactgcctttttttcataaaagtacaattagtaaaataatatactaatttatttttaattttaactaaaacaaaatttgtctctcaatataatgcagaatattactcggaacacctacctcatgcatcactcagtactgtaagtgaatcacaaagaacctctttacttagattttcatcatgcattttaatgtccttactctttcatagaagaggtcataaatgctcacctaataaaaaataatctctcatatcttttggtcacatgctttcacatatgaatacaataggaataaagaaacaacatcagccaggagcagtggctaacacctgtaattccagcattgtgggaggccaagctgggcggatcacctaaagtctcgagttctagaccagcctggccaacatggcaaaaccctggctccattaaaaatacaaaatttagccaggcatggtggtttgtgcctgtaatcccagctacttgggaggctgaggcaggagaatcacttgaaacctggagatggaggttgcagtgagctgagatcgtgccactgtactccagcctgggtgggcgacagagcaagactccatctaaaaaaaaagaaaaagaaaaaagaaaaagaaaaactaatttctttagcatgaagtaatttgagagttaattacaacattaacatgaagtaatttgagttaattacattatttgtatgaagtaatttgacagttatttacttttaaaaaaatctgtaatctttctaaaaaaaagtatacttgtaactctccaaagaatcttctactcttttaaagttataaacaaataatttttctaccaagtttagttttggattattttctaaactcagaactctgattcagtgtaaagtctgaagtgtcattgccttatatatttctaatgtaaattctctgatatttacatagacttaccattgaattaaattttttttctatttactgtatatgcaaaaatattttaatatgaactctggaattttctaacctgtagtttttgaataaatgtttttttctaaatttattacatttacagggtttttctttgatataaattctctgatgttgaacaaagtttgagcaattgcctcagggtttgctctaatacagaatgaatacaacaagatctgtgttacaagtaaagttaccacaacttcgtttatatttgtaatgtttgtcttcaaaataaatcctcttcagcactttaaatgcttatattttctgaactcttttgacagtaattgcacctttaatgctattaagtataaattctctgatgctgaataagatgtgtgcagatattaatcacttttttactttctttatatttgtacatttgttctcatcaagtataaaggctttcctgtgcaataaggtttgagcattgtgtaagttttgccacactgttcacacttgtagaagttttctccagaatgaattaccttacctacaatccagtgtgataaccatttaaaggctttgtcacattcatatttctattatttctcaccagcacaatttcttttatatttggaaatctttgcaatgttgtcacaagcattgttacaactttcaggtttgtagagtttctctccagtatgaatcatcttatgtctgttaagaatagaggagttgttaaaggctttgccgcattcttcacacttgtagggtttctctccagtatgaatcatcttatgtgtagtaaggtgtgaggactggttaaaagctttgccacattcttcacatttgtagggcttctctccagtatgaattaccttatgtttagaaagagttgaggactggttaaaagctttgccacattcttcacatttgtagggtttctctccagtatgaattatcttatgtgtagtaagttgtgatgataggttaaaagctttgccacattcttcacatttgtagggcttctctccagtatgaattctcttatgtgtagtaaggtgtgagaaccggctaaaggctttgctacatacttcacatttgtagaatttctctccagcatgaattctcttatgtgtagtaagggttgaggattgtttaaaagctttgccacattcttcacacttgtagggtttctctccagaatgaattctcttatgtgtagtaaggtgggataaccggctaaaggccttaccacattcttcacatttgtagaatttctctccagtatgaattatcttatgtgtagtaagggttgaggactggctaaaagctttgccacattcttcacatttgtaaggtttctctccagcatgaattatcttatgtgcagtaagggttgaggactggctaaaagctctgccacattcttcacatttgtagggtttctctccagtatgaattctcttatgtgtagtaaggtttgcagattggttaaaagctttgccacactcctcacatttgtagggtttctttccagtatgaattatcttatgtgtagtaaggtgtgagagccggttaaaggcttttccacactcttcgcatttgtagggtttctttccagtatgaattcttttatgtgtagaaaggtttgaggcctcattataggctttcccacattctttacatttgtagggtttctctccactatgaattcttttatgttgagctaagtgtgaaagcatgcaaaatgacttttcacattctttacacttgaaagatttctttccagtatgtcctatcttatgtctgtttgaatttgaaaatttatgaaagactttcacatatttgtcatattgaaatattttgttctgggtagttgtcaaacactggttaagtccattgtaacattctttgtgcaccttacactcatccatgcttttacagtattttcttaactgtaaattttcacgtccacattttttatatgttctcagtatcactttttggaaataattttttttgccctgctttggccaaaggtcttgggcaaaataagaatatacaactgaaagaaataaaaataataaattacttcacttactagactcagatgaatgtactttacaaatctaacctataaaattatacaaactacatcacaagatgttacagcaaaatattacacgctctaacattttcacagacatataaaagcatacagaacaaattacatttctgaaaaattaaagtaagttaagtgtgtgcagtgccccagatgagcccaatgcaaagagccacacagaagaaagaaaagtctgttacatttacccagtgcagatcttcctgcttccctatataacatagtgactttagaaataaattgccaactcctggtttcattttcaaaagacaagtaaaataatggcttatacatctttatttctcaatggcaaggtcttttacactggttcctgtgtctcattgcataaaagttctgaaagaaatagtggtattctttcaaatgacagtttgaggctgctgagatgaaaggtaaggtaccaaaacagatatatagaccaatggaacagaatagagacctcagaaataacaccacacatctacaactatctgatctttgacaaacctgacaaaacacaagaaatggggaaaggattccctatttaataaatggtactgggaaaactggctagccatatgtagaaagctgaaactggatcccttccttacaccttatacaaaaattaattcaaaatggattaaagacttaaatattagacctaaaaccataaaaaccctagaggaaaacctagacaataccattcaggacacaggtatgggcaaggacttcatgactaaaacaccaaaagcaatggcaacaaaagccaaaattgacaaatgggatctaattaaactaaagagcttctgtacagctaaagaaactaccaccagaatgaacaggcaacctacagaatgggagaaaatctatgcaatctacccatctgacaaagggcaaacatccagaatctacaaagaacttaaacaaatttacaagaaaaaaactaacaaccccatcaaaaagtgagcaaaggatgtgaacagacacttctcaaaagaagacatttatgcagccaacagacacatggaaaaatgctcatcatcactggccatccgagaaatgcaaatcaaaaccacaatgagataccatctcatgccagttagaatggtgatcattaaaaagtcaggagacaacaggtgctggagaggatgtggagaaatagaaacgcttttacactgttggtgggactgtaaactagttcaaccattgtggaagacagtgttgcgattcctcaaggatctagaactagaaataccatttgagccagccatcccattacggggtatatacccaaaggattataaatcatgctactataaggacacatgcacacgtacatttattgcggcactattcacaatagcaaagacttggaaccaacccaaatgtccatcaatgatagaatggattaagaaaatgtggcacgtatatactacagaatactatgtattcatgaaaaaggatgagttcatgtcctttgcaggcacatggatgaagctggaaaccatcattctgagcacactatcacaaggacagaaaaccaaacaccgcatgttctcactcataggtgggaattgagcaatgagaatacctggacacagggcggggaacatcatacaacggggcctgttggggtgtgaggggctgggggaaggacagcattaaccaccatggcacatgtatacctatgtaacataactgcacgctgggcacatgtaccctaggacttaaagtataatgaaataaataaataaataagaaaggtaagttttacagcagcagaaagactgtggtactacagacaggaaacaattatagcaagtgattattggttattaaggagtttggtggctcaaacctgtaatcctagcactttgggaggccaaggtgggaggatcaactgaggtccggagtttgagaccaagccttggcaacatagtgaaaccctgtctctactaaaaatacaaaagtagctgagcatggggtcacatgcctgtaatcccagctaagtgggaagctgagaccagataatcacttgaaccggagaagtggaggctgcagtgggctgagaccatgccattgcactgcagcctgggtgacaggagcaaaactctgtttcaaaaagaaaaaaaaaaaaaaaaaaagaaaagaaacacgaataaactccgctgactaaaaactaaacacaaaattttagacaaggcacatcctaagaacatgtttgagagactcccagaatctctagccaagataattgttttcagactatgtcagaaaaaaaaaacattttaaagactgtgacaggtagcttttttgatgtccaaatctcattccagattacaatgtatacaaaacagggcaatataatttcatcaaaaataccatataaacttcagaaagaaaccataaaaaagatgtacacgttttaaacactaataagttgaataatatccaatgagtgaaacaggaacacagtccactgtagaaaatcacaaaaatgagaataaaaacaagaatatcaaaatattaaaaaaaaacaatttggtggtaaaaaatagaaaaataaacaactggaaaatcctaaaagaaaaatgatgtaaaaatgaagttcaacaaacaaattaggatacacacacagatatttaaacaaatacatattaagcacattttcaaaaatcacagacaggaagaaagtcttaggagcagcaaggtaaaagtaatgtgtcatttacaaacatagtcttatgatataaccagtgaattatcaacaaaaattttgcagatcagaaagataccgtgtgacacaaagtcctgaggggggggaaaaaaaaaagctatcaagttgagaataataccatcaacaaatctgtcctgccacataaaaagaaaaaaccttccaaaacaaccaaattctgaaaaagtatattagcactgcatatgccctacatataaaagatgatgaaagcagtttcttaaactgaaagtaaaagtattaaaaaaaaacacataatcatataaaaatacattattttccaggaaagatatgcacatacataaaaacagaatcttgtggcattatcataatggtgcagaaaacattttaaattatctctaaattttgaaaaataaaagcacagaaattataaacatctgttaatgaatatacaatgtaaaaacataattagcaacatcaaagacaaatttcagggcagatgtaatgaggaagatttttttattcaactgagatttattttataccaaattaaaactatactgttgtttcttatagaagttttatggaacccccaaggtgccaccaaaaaaaaattctgtacaaatatacaaaagtgaattagaaataagtaaaagcatatcaatacaaaaatcaaaaagacacaaagagagaaaatgagaaacaaagatgcaagaatcaaataaaataattaaaaatgtaacagtctgtctttatcagacagttatttaaatgtatatataaaattaacttttaaatcaagagacatactttcaacagattaaaaattttaaaaaccaagatccaactttttttttctacaagagtcagtagagatctaatgataaaaaacactaaaaggggcaagatggaagaatacatttcatgcaaatatgaatcaaatgagagcagaagaaatcaagatagtattatgcaagctacatcttaagtcaaaaactgtcatgttttacaaaatgtacttgaagttaaaactccaaggagacaaaaaaggacattaaaacttacagatttaggctgggcatggtggctcacgcctgtaatcccagcactttgggaggctgaggcaggtggatcacttgaggtcaggagttcgagactggcctggccaacatggtgaaaccgactctactaaaaatacaaaaattagccgggcatggtggtgggcgcctgtaatcctagctactcaggaggctgaggaaggagaatcacttgaacctaggaggcagaggttgcagtgagccgagatcacaccactgcactccagcctgggacacagagtgagactctgtctcaaaaaaaaacaacaaaaaaaaaccacttcagatttactcactgggaacctatgacaaatctgtatgtacatctgtgtgtgtgtgtgtgtgtttttgtgtgtgtgtgtgtgtgtgtgtatctcacattagggctccaaacatataaagcaaacattgacagaataacagagacacatagagagcaacataattatagtaggatattttgacactgcacttgccgtaataaaaattaaatgagaatattagtaagggaatagaggacttccaggcagtgtaagacaattatttctaacagaggtatagaaaacacccctcaacaccaggacacacatggttctcaatagctaatacaacattttccttcatagacctcctcttattacaaaaaaaagaaaattaagtcttaccagtttttttaaaactgaaattttataaattactttctatcaccaaaatgaaatgagtatacaacgagaaaaaaaatctgaaaaattaacaaatatatagaaattaaacaacacactcttgagcatgctcttgtgaaaggctgaaaaaggtaatactgtaaagatgtccatcctgctcaatgcaatctacagatttaatgcaatgtttttcaaatttctcactgcatttttgaagaaacagaaacagcaatccctcgagtatacagaatctctacatacaatgaagtacccaaaaatattaaaaacaaaacaaaacaatgttggaggcattacagttcctgatttcaaaacacaaagctacagaattaaaacaatttggtatgagtataaaggtgaaaaagtagactaataaaatagaatgcagcacatatataaactctcacatatatggtcacatgaagagtcatttgcatacccacatttattttagcattgttactaaaagccagtaggtaaaagcaaggcaaatttcggtcaccaaatcgttcagcagatataatttgaaatacaaaaatgccaaaatattactcagtttgaaaaaaagcaggaaatattctaacaactataaaggtaaatcctgatgactttatgcaaaataaaatgagccagccacaaacagattttatgagatatacaaagcagttatactcttagaaacagaaaacagaatggcatttgaaaagtgccaggaaatgggaaaaattggtagttgtttaatgtgtattgtaaactttctagaaatcttttataaaataatgtaaatatacttaacatgcctgaaatgtacagtgtttttgagtcagggtctcactctgtcacccaagctggggtgcatggcacaattacagctcactgcagcctcaaacttccaggttcaagtaatcctccctcctcaatctcccaagtagacaggaccacttcaccatgtctggctacgttttaaaatgctttacagagatgaggtttccatatgtcttccaggatgttctcaagcttttgggctcagtcttcctgccttggcctcccaaaatccggggattacagacgtgaaccaccacgactggccatgaaatgtacattcaaatagatttaagatggtaaattttaggttatatgtttgtacaattgttttttagaagaataactgaagatccagaattataaacctttccaaaaattaccttcaagtcacaaaagtgtttccctcacacataggaaatatgtttattattaaacacaaggtgaaaataagactatttccatgactactcatttagacaagataaagccaccattaaaaatcagctaagaaaaaatatatacaagattagccataaccaaaattggggtcatatttatagataaaaacacacacacatataatcagattgtaatagagataaggctgatttatctcttaaaccccacaccgacttacatgtaaaaacagaattgcaaattgtctaaaattgtaaaaccaaaaaacacaataaacttatgttaagaaacctacactgaaaaaacgcattaatatgaaactaaaaaataataataaatgtttactcataaaatctggtatgtaacttgatgtagcattaacaaagaatttgtgtagataactggaatattttactgtaactgtgtactcattgaaggtggctattttgaatcattggcatgcactgtaatgcagtaaaagtttcagataaaatgcagtataatcataaacagaagactctaatgacaaactgataaataagcattttaataaataagatcatttctaagttttaaatatatgctattcttacacaaaataaaactgctgtaatccaaatttagaagcaaaaaatagccttacattgctaaataaagaaaaaatatatctattttgcagaatatggtcagggcctctgatatataaaacaaatatttgggaacaaattatgtcatattttaggtactagctgacaaaagtgagtgaaaatcctgtctttttttgcctgtctatatttcctttttgtctgtctactaattatctaattcacctcagacataacatgtcaattttagtatattgtcctaaatgtctaaatctaaaactactgacaaaattgaaatagaaagtagaaagtaaaaatgtacaggaagagtgacatcactaagatggaaaaataaatggtgccttatttgcttattttctgacagcaagaaaattcatcagcctgataaaaatgcctttatgagagaaacaggaatcatgactcaaacctgtaatgagaaatgctttaggacagaacttcaagatcaacctgggtcatgtagcaagaacccatctccaaaacaagtgcccttaaagagctttgagatctatggagggagttgtgaaactctgctaatgcccaagattgaggaatattctcttcagaaggcaggctttcattcaggtggcaaactacaggacccctgttcttggctacagaccagaaaatggcccaccaaacttggtcccactgagaattctgaacttaccctgcaatcatcccaaactcctcccagccacagtctgggagaggtcttgccctttcagaggtctggagagagacacccctttatagccacgcagcaggcctgcagaccttggccattactgtggtccctgaagcagtttcatgactcagttttatcaccctgagccacagttcatggcaagttctgcctatgtagaaacccacacagtgaccttgggaaatcctctctggtactcagtgaaagccaaactcatctacatcctaatataaagcctaccatatgcagacccaagtgcagaaatctgccctagcgtctgccctacagagcaaagtcctgaaggatactcactctgtccaaaaataaaatgggaattacaactacctaagccccttgtaacaagccaactaaaggtggaccctaatgcagacccagcagcctttgtaaacaagctacctacccctctccactacaaacccataggacatcccatcaccctgggggctcaacaaaagatcttcactttctgaaaccaatttataaaaacttgaagagggccaggcgcggtggctcacgcctgtaatcccagaactttgggaggccaaggcgggtggatcaccaggtcaggagttcaagaccagcctggccaacatggtgaaaccccatctctactaaaaatataaaaattagccaggcatggtggcacgcacctgtagtcccagctactcgggaggcagaggcaggagaatcacttgaacctgggaggtggaggttgcagtgagccgaggccgcgccactgcactccagtctcagcgacagagtgagacactgtctcaaaaaacaaaacaaaacaaaacaaaaaaaaaacaagaaaaacttgaagaggtgtttactccttcaaactcacagacaccaatgcaaaagtttattatgcccattctcaatgcttctattttaacacagcactggaagtatgtggaataagtaaaaaaaaaaaaaaaaaaaatttaagtcactgaaattgaagacaaataagtaaaaagttgctttttgtagatcatttgatcttgtatatagaaaaccataaacagtacatttaaaacctaattaaagtaataattacactcaataagttagcaaaatagaaaattaacatacaagtgtaagttatggttccatacactttaaacaaactatctgacaaaagagagacagaaagcaatcttatttacaatagcactaaaataataaatttctgagaacaaatttaaccaaggagcttaaatatctttcaaataaaagatacatcaataattggagaagacaaaaataaatttaaaaacatttcatgtctattgattgaaagaatttttttttttttttgagatggagtttcactcttgttgcccacattggagtgtagtggtgcaatctcagctcactgcaacctctgcctaccaggttcaagcaattcttccgcctcagcctcccaagtagctggaattacaggcgcctgtcaccacgcctgactaattttttgtatttttagtagagacagggtttcatcatgttggccaggctggtctcaaactcctgacctcaggtgatccacctgcctcagcctcccaaagtgcagggattacaggcgtgagccaccatgcccggctgaaagaatattattaaagtgccgtgttatctacagtgatctctagattcaataaattccctatcaaaattccagtattttttttttacagtaatagaaaatacaattctcggtcaggcacggtgggtcacacctgtaatcctagcactttgggaggccaaggcaggcggatcacaaggtctaggagttcgagaccagcctggccaatatggtgacaccccgtctctactaaaaatataaaaattagccaggcatggtggctcgcgcctgtattcccagctactcaggaggctgaggcagaagaatcgcttgaacccaggaggcagagattgcagttagccaagatgatgacactccactccagcctgggtgacagagcaagactccatctcaaaaaaaaaaaaaaaaaaaagaaagagaaaaagaaaatacaattctcacatagacttacaataaactttgaatagccaaagcaatcttgaaaaaaaaaggacaaagcagaagaacatcatactttataatttcaaactatacttcaagactataataagacagaatgcaatgtgcagaaaaattagcaataaaaaaccaatggaacagaaaccactgctctcacacatttaggacatgatgtaaaaacagaacttgaaaaacagtttaacatagagtttctcaaaattatgcagattatctatgtgttttcaaaaacaatgaaaaagcagtcagatttcacagtctcttatgtgccatgaagagggctgtcttggctgtcactgtaaacctgaagaagatcaccaaagggaaagtaaaatctttagagattttaaaaatataagacagaagatgcttctatgtgaaagcaaaatttaaaaaattcaagtttcctagaaactatttcctttggaacacagatttcaaatcattttaaggaatggctttttttttttttctactttggagctctcatctgtgtcgtctgttgtattcactttcactctcacctacctgggggttcagttaccatctcatgtctcttcacattccaaggttcttttccttgctccagacaggtgatcaggtctggcttagaggcagcaatacctgttttattacaaataacatgaatcttgctcatattctccaattaccaatttagtagtgtgttcagtaaaaaggatgtaatagaatattctagtaaattgattccaaaatactaatacacaacaaaaaattttaaatatttaggaaatattttaattttgtaagttcttaatttcactacctgatactactaaatcaaaaactggtagtggcaattagattttaagatgtgggcaacagtatgttatgccactaaatttctaaaattaacactaatctagagtgaagaacacagatcagctcaggagtgtggaaagttcagatcaaaatgaaacatcttgaaattcttttctacatagacaaatcttgaagttaaaaaaaaaaaacaaaaaaaaaaaacagagatctgaaagcataaactaccaaaaaaaccattctacaaaaaagagaaataaaatttatagggtatattagggaattgtatattgaagttatcctcacccacaaagaccaggtttctgtagttctctaacatcacattcctatataaattctgctgtgcggtgtccaggcattgccactcctccagagagaattctaaggccacatccctaaatgtcaacactccctgaaaaacatacaaacacacatacatatttaccaagtggccataaacagaatttttaatttgactcaaggtaaaacaagagtaaagagaactggttcttacttataggagtgactgatatatttaataaataactttcagcacagaagtattctctaatgtattctctaactctgagaaaagagagtggcataagatccacaacatcgaggtatagatgatacttttttggatgatgaagtataaaactgagggcattaacactaacatgtacacttttgagtgctacatttacatcatacagaataagttgtgtaaatttttcagatggaaaagacatattcagttagaaaatactgctcacatgttaatgtgtaaaataaactggagatcttgttaatgcagattattttttcagaaaatctgggctgggagcgatggctcacgcctgtaatcccagcactttgggaggctaaggcaggtggatcacgaggtcaggagaccgagactatcctggctaacacagtgaaaccctggctctactaaaaatacaaaaaattagccaggcgtggaggcgagagcctgtagtcccagctactcgggaggctgaggcaggagaatggcatgaaccccagaggcggagcttgcagtgagctgaaatcgcgccactacactccagcctgggtgacagagcgagactccgtctcaaaataaaaaaaagaaaagaaaatttggaataaaatctgagtttctgaatctctaacaagctcaccagtaatgcccatgtttttggtccaagaaaactattttgtcaaacatccagtaagtggaagagcctgtgtgtttttcagtttttctggcctgtaaacaaagatgagagctttcgttttccaaagacagataaatgcaaagaaaacctaagaaaggtcagctgccagattaaatgtgattgtttatgcacatctgctgaataaagatactcaataatgaagagaaaaataatgaactctatagaaaaaaaaatctgtcagagttcattaaccaagtgagttattaacatcaactgcatgaagataaatttttatgatgtgctgatgcacacagaaggacacggcatcactgctatggtatctcccagccaaaagtaaatcatagcctgaatttaatcataaagaaacattggttttatgcaaagttccagatactgatatctgccatgttctgtaaattttaatagtgattttaagtagtctttctttcacaccctaaagagcaagtatctcctaataatttttttttcaaaactgtctgggtaataaatgccatcccatttaagcaagcattttcttaatcctgttctgcatagagttaatggagaacagagatagaacctcaacattacatgctctccatctttactacggactccagcttttccccaataggaatattcagtatccaccctttccatgttccacagccaggaaagaaaccttcttaatattgcagttcataaattcatggtgagaattctttatgacgtgtaagaagccatgatgttgagaatgtaaagaagactctggtatataggaaagaaatatttttcagacacccctgactattataagaactaaaaagcagttaaactcattaggaagaaaaagcacatgtagaaaagtaaagctttgcaagtactgaacatatggcattctaggacacagagtggacacagctcttcatctgagacatgcttagctaaaaaaaaaaaaaaaaaaaattaggggcagggcaaagatggccaactagaagcagctgcgatcagaggctcccaccaaaaagaaccataatggcctgtgaatcctgcacttgcacctgaggtatccaggttctctcatcagaactgactaggcagctggcatgacccacggagaggaagaaagagcagtgtggtgcagcaacccacctgagagccatacggggaaggggagcccccaccccccagccaagagagatggtgaatgaatgtgctacttagccgacaaaaccatgctttttccatggaactgtgcaacccacaaacggaaagatttcactcgtgaacccatgccacaggagcctagggtcccaaccccagagctgtgcagattctcaacaacctctcagctaaaatctgtttaagcctgctgagttcccaggggaggggtgaccagcaccacaggtgtggctgcctgctgtctaagccatctgagctccccggggaggggcagcaaccatctctacagctcctggcaggcttggttccaagaagtgtcccccacagcccaacacaccggctgtgccagactacagctacagcacctcttcaggcctgactctgacccatccctcctcattttgtggggccaccctgcaggaactccaactccagccaggggctcagggacagaactctgatctccctgggcctgagtccctaaggggagaagtgattgcagtctctgtgggaacagcagacttagcttttcctcctgttagttctaaggaatccaagcagcccagaggagtggttttaacttcagtgaagcataccccctccaccaagggacaataaaagtgcttcattaaatgggttctgttcctcgtgtcacccaatgggtgaaatactccaactggggttgtcagacactctatacaggagtgttcctactggcatcagattgttgttccttgaggtcaggcagcccagaggaaggagaaggcaaccatctttgctgttctccagcctccttgagtattatctccaggtgcaggagtgaaccacgtaaatagggcctgaagtgaacccccagcaaatcacagcaaccatacagaagagggacctgaccactgaaaaaaaacaaacagaaatgaacaacagcaataaaaaagtccccacactaacctcatccaagagtcagcagcctcaaagatcaaaactagacaaactcatgaagatgagaaagaattaatgaaaaaaacgctgaagccaggtgtggtggctcatgcctgtaatcccagcactttgggaggctgaggcgggcagatcatgaggtcaagaaatcgagaccatcctggctaacacggtgaaaccctgtctctactaaaaatacaaaaaattagccgggcatggtagtccgcacctgtagtcccagttacttgggaggccgaggcagaagaatgacgtgaacctgggaggcagagcttgcagtgagctgagatcgcgccactgcactccagcctgggcaacagagcaagactccgtctcaaaaaaaaaagaaaaaagaaaaagacactgaaaacccaaaaggcaagagtgcctcttctccaaatgattgcaatgcctctccagcaagggtgcagaactggatggagaataagatagacaaattgacagaagtaggcttcagaagatgggtgataacaaactccactgagctaaaggagcatgttctaaccaaatgcaaaaaacctaagaaccttgataaaaagttagagagaggagctgctaactagaataaccagttagacagagtctcactctgtcgcccaggctggagtgcagtggcgcgatcttggctcactgcaacctccgcctcctgggttcaagcgattctgctgtctcagcctctggagtagctgggattacaggcgcgtgccaccatgaccagctaatttttctacgtttagtagagatagggtttcatcttgttggccaggttggtttcgaactcttgacctcagatgatccccctgccttggcttcccaaagtgctgggattacaggcgtgagccactgtgcccagtcctattttgttaattttttcaaaaaacagctcctgaattcactgattttttttttttggagggtttttcatttctcggctgggcacggtggctcacgcctgtaatcccagcactttgggaggccaaggcgggtgaatcacaaggtcaggagttcaagaccagcctggccaacatggtgaaacactatctctactaaaaatccaaaatttagctgggtgtggtggctcacgcctgcagtctcagctactcaggaggctgaggcagaagaattgcttgaacccgggaggcggaggttgcagtgagccgagataatgccactatactccaacctggatgacagagtgagactctgtctcaaaaaaataaaaataaaagcaaaaacaaaacaaaactggcaaaccaaatccagcagcacatcaaaaaacatccaccaggtcgggcgcggtagctcacgcctgtaatccgccactttgggaggccgaggcgggcagatcacgtgagaacaggagttcgagaccagcctgaccaacatggagaaaccccgtctctactaaaagtacaaaaaattagccaggcgtggtggtgcatgcctataatcccagctactagagaggctgaggcaggagaatcacttgaacccaggaggcagaggttgcagtgagccgagatcacgccactgcactggacaacaagtgcgaaactctgtctcaaaacaaaacaaaacaaaaaaactgatccacaacaatcaagtcggcttcatccctgggatgcagggctggttcaacatatgcaaatcaataaacgtaattcatgacataaacagaactaaagacaaaaaccacatgattatctcaatagatgcagaaaaggcctttgataaaattcaactttctttcatgttaagaactctcaataaaccaggtgttgatggaacatatctcaaaatagtaagtgtgtttatgacaaacccacagtcaatgtcatattgaatgggaaaatgctggaagcattctctgaaaaccagtacaagacaaggatgccctttctcaccattcttattgaacatagtattgaaagttatggccagggcaatcaggtaagggaaagaaattaagagtattcaaataaaaaaacaggaagtcaaattgtctctgtttgcagatgacattattctatatttagaaaattctgtcatctcagcccaaaaactccgtaagctgataagtgacttcagcaaagtctcaggatacaaaatcaatgtgcaaaaatcacatgcattcctataagccaacaacagaccatcagagagccaaatcgtaaataaacatcacaattgctacaaaaagtaaaatatataaaaatacagctaacagggaatatgaaggacctcttcaaggaaaactacaaaccactcctcaaggaagtaagagagcacacaatcaaatggaaaaacatcccatccttatggatagaaggaatcaacatcatgaaaatggccatactgcccaaagtaatttatggactcaatgttattcccatcaaactaccattaacattcttcacagaattagaaaaaacaatgactttaaatttcatatggaaccaaaaaagagcccatatagccaagacaatcctaagcaaaaagaacaaagatagaggcatcacactacctgacttcaagctatactacaagactacaataaccaaaacaacatggtactggtccaaaaacagacatacagaccaatggagcagaaaagagacctcagaaataacaccacacatctacaaccatctgatattcaacaaacgtgacaaaaacaagcaatggggaaaggattttctgttcaataaatggtcctgagaaaaccggctagccatatgcagaaaactgaaactggacctcttccttacatcttatacaaaaatttactcaagatggattaaagacataaatgtaaagcccaaaaccagaaaaaccctagaagaaaacctaggcaataccactcaggacataggcatgggcaaagacttcatgacgaaaacgccaaaagcaattgcaacaaaagccaaaattgaagaataagatgtaattaaactaaagagattctacacagaaaaagaaactatcatgagagtgaaccagcaacctacagaataggagaaaatttttgcaatctacccatctcacaaaggtctaatatccagaatttacaagaaactttaaaaaatttacaagaaaaaaacaaacaattccatcaaaaactgggcaaaagctggaagtggtggctcacacctgtcatcccaccactttcggaggccgagatgggtagatcatttaaggccaggagttctagaccagcctggccaatatggtgagaccccgcctctactaaaaatacaataattagctgggcatggtagtggatgtctgtagtcccagctactcaggaggctgaggcagaagaatggcttgaacccaggaggtagaggttgcagtgagcagagattgcgccactgcactccagcctgggagacagaacgagactctatctcacaaaaaaaaaaaaaaaaaaaaaaaagtgggcaaaagatgaacaaacacttctaagaaggcatttatgcagccaacaaatatatgaaaagatgctcaataccactgatcattagagaaatacaaatcaaaaccacaatgagataccatctcacaccagtcagaatggtaattattaaaaagtcagaaacaatagatgctggtgaggctgtgaagaaacagaaacacttttacactgttagtgagaatgtattagttcaaccatcgtggaagacagtgtggtgattcctcaaggatctagaaccagaaatatcatttgacccagcaatcccattactgggtatatactcaaagaaatataaatcattctactataaagacacatgcacacgtatgtttactgtagcactaattacaatggcaaagacatggaaccaacccaaatgcccatcaatgacagacttgacaaataaaatatggtacatacacaccatggaatactatgcagccatacaaagaaatgagatcacgtcctttgcaggaacatggattaagctggaagtcatcatcctcagcaaactaacacagggatagaaaaccaaaaaccgcatgttctcattcataagtggtagttgaacaatgagaacacatggacacagggaggggaataacacaaaccagggcctgttgtgaagtgggggcaaggggagggcacctagaagggtcagtacatgcagcaaaccaccatgccacacatatacgtatgtaataaacctgcacattaactaagcactgcctctcaagctttaatgagcttataaatcacttggtaatgttggtctcactctatgtaatgtgattctgcaggtatggaaagggtccatgagtgggtgttttaaataagtcccgtcaaggctgatgttgctccccctaggctcattattagcattagttagagagcaggcacagcacagagtctcttacacttggcactcttgtcacaacacaattacttctgaaacaaatgacaaccaacctccatcttaaagtatcataatctttgttggctttttaaagtttacacagaaaacagaaagtagcaatatctgactgagtctgcatttatttttatttttatttttatttatttacttattgagtctcgctctgttgcccaggctagagtgcagtggcgagatctgcacttactgcaacctctgcctcccaggttcaagctgttcttctgtctcagccttccgagtagctggaactacaggcatgcgccaccatgcctggctaattttttttgtagagccaggatctcaccatgttggtcaggctggtctcaaactcctgacctcaaatgatctgcccatctcagactcccaaagcgctgggattataggtgtgagccaccgcacccagcccttgcttttgcattgtaagtacttcagcctgcaaataattaccttggataatcaagtttctgtcaaaggaacttactctgtatcttttagtctttatcattctgtattgttaaatttaattctacctttgtgtccaactttcatgtgctcttaaaatgagctttactctgaacaaatctgtgcgtacttttaatgaccgaaaattaaaaaaataaatctttgccaaagcaaaaacaaagctatgaatctcaggttacaaataaagacaattctgagtcaaaaagaatgataaaaggtttacttagctgttaatataatttacatatatttcaaaaaagcagagaaaaatatctacatataatctaaatgcgttaataaaacagagataaacaaaatatcctcccttattttcacatatgtgaataaagcctcttatttttaatttgcattttctcctaaaacaaccaggtcactggacatgttcttgaactcttggacatctgaattgtgaacttgaaagaatgtttatggtaaaaacgcagaagagagaaaggtgttataataaattgatgggtgcacacaaataaatcaagttgttagagaccgatgaagagaatgagatactgacacaataatagtgggagactacaacacccatgggcactaatagacacattattgaggcagaaaattaacaaagatattaagacctaaactcaacacctgactaaacagtcttaatagatttctacagaactctccatctaaaaagaacatagtatacagtcttctcatcattacgtggcacatactctaaaattgaccacacagtcagaagcaaaacaatcctcaacaaatttaaaaattccaaaattatatgaaccacacacagaggccacagcttgataaaaaagtaattcaatacaaagaaaatcacttgaattatacaagtacatggaaattaaacaacctgcacttgaattacttttgggtaaataatgaaattaaggcaagaaccaagaagttctttgaaaaaaatgagaacaaagatacaacatacctgaatttttgcaacacagctaaggcagtgttaggagaaaaatttatggcatgaaatgcttacattgaaaagttagacttcagtttaacaacctgacatcataagtaaaaggctgagagaagcaagagccaatcaacccctaagctagcagaagacaagaaataaccaaaatcatttctgaacggaaggagattttcacatgaaaaactatacaaaagatcaagaattgcaggagtaaaatcttaaaaaaaaaaaaaaagataaattctcaacaaaatattggcaaaccaaattgggcaggacatcaaaaacctaaccgactatgatcgagtagggtttatttttgggatgcaaggttaattcaacatacacgaggtggggcgcagtggctcacacctgtaatcccagcactttgggaggccgaggcgggagtatcacgaggtcaggagatcgagactatcctggctaacatggtgaaacctcgtctctactaaaaatacaaaaaaattagccaggcgtggtggcgggtgcctgtaatcccacctactcaggaggctgaggcaggaaaatggagtgaacccacgaggcggagcttgcagtgagccgagattgcaccactgcactccagcctgggtgacagagcgagactccgtctcaaaaaaataaaaaataaaaataaaaataaaaaaaaataataataatgagttatccatcacaaacccacagacaacatactgaatacacataacctggaatcatttttctttgaaaactgggacaagacaaggatgcccctcctctcaacactcctattcaacataaaactggaagtcctggccagagcaattaggcaagataaaaaaataaaaggcatacaaacaggaagagaggatgtcaaaacctatttctgtttacagatgacataatgccgtacctgaaaaaccctataatctcggcagaaaagcttttcaaactgacaacttcagtaaaatttcagaatacaaaataaatgtacaaaaattagtagcatccctgtaaatcaaaaacatgcacgccaaaagccaaatgaaaaacggaatccaattcacaatcactacaaaaagaataaaatatctaggactatagctaaccagggaggtcaaagatctttatgacaacactgtgaaaacactgcttaaggaagtcagagatgggccaggtgcggtggctcacacctgtaatcccagcactttgggaggccgagacaggcagatcacctgaggttgagagttcaagaccagcctgaacaacatggagaaaccccgtctctactaaaaacacaaaattagccagggtggtggcgcatgcctgtaatctcagctactcaggaggctgaggcaggagaatcgcttgaacccgggaggcagaggttgtggtgagcagagatggtgccattgcactccaacctgggcaaaaagagcaaaactccgtctcaaaaaaaaaaaaaaaaaaaaaaagtcagagatgacacaaacaaatggaaaaccattttatgctcatggatagaaaagatcaatattggccaggcaaagtggctcacacccataatcccaacactttgggaggctgaagcggctggatcacaaggtcaggagttcaagaccagcctgccaacatggtgaaaccctatctctactaaaaatacaaaaattagccgggcgtggtggcaggcatctgtaatctcagctactcgggaagctgaggcagagaactgcttgaacccgagaaggagaagttacagtgaaccaaaatcatgccactgcactctagcctgggtgaagagcaagactccatctcaaaaaaaaaaaaaaaaaaaaaaaagaaagcaagcaagaaagaaaagatcaatattattaaaatggtcatactgtcaaaaaattagatttgctatttttatcaaactaccaaaaacatttcttaacagaactaaaaaaacaaaacaaaacaaaaaaacttttaaaacttatatggtaccaagaaagggcccaaatagccaagccaatcataagcgaaaagaacaaagctgaagtcattacattacctgaattcaaactatactacagggtacagtaaacaaagcaacatggtactggtacaaaaacaaactcacagaccaatacaacagaatagagagcccataataataccacacacctacaaccatctggtctttggcaaagctaacaagaggaatctggaaagaattccctatttaacaaatgatactggaataactagctagcactatgtagaagattgaaactgaaccccttcattacaccatatacaaaaatcaactaaagataaattaaatatttaaatgtaaaacttcaaattatatatttaaaaagatccatgaaataccattctagacacagaagccggcaaaaattttaaaataaagataccagaagcaattgcaacaaaagtactaattgacaaatggaacctaattaagctaaaaagcttcttcacagcaaaggaaaccatcaacacagtaaacaaacaacacacagaataaaagaaaatatttgcaaactatgcttttgacaaaggtccaatatccataatttataagaaacttaaacaagtttacagaaaaaagaaaggcctcactaaatggtagacaaaaaacatgaaaaagatttttttttcaaagaagacacacatgtggctaacaagcatataaaaaatgctcatcactaatcattagagaaattcaaagaaaaaccataatgaaatatcatctcacaccagtgagaatggctagtattagtcaaaaggtaacagatgctggcaaggttacaggaatgcttataccagtgggagtgtaaattagttcattataaaaagcagtgtgacgattcctcacagaactaaaacagaattacctgttgacccagcaacctcaaaatcgggcatatacccagtaaaatacaaattattctattataaagacatacgcatgttcattgcagtactattcacaatagcaaagacatggaatcaacctaactgcttctcaactgtatactggataaagaaaatatggtatggctggccatgatggctcacacctgtaatctcagcactttgggaggccaaggcaggtaaactgcctgagctcaaaagtttgaggccacccagcggaacatggcaagaccccatctctacaaaaaatacaaaaaaaaaaaaaaaattagccaggtctggtggtgtgtgcctgcagtctcagctatgtggggggctaaagtaaaagaagattgcttgagcctgggaggttgaggctgcagtgagctgagatcatgccactgcactccagtctggacaacatagtgagaacctgtcttcaaaaataaaataaaataaaaggcttaggccaggcacagtggctcacgcctgtaatcccagcactttggtaggccaagacaggtggatcacaaggtcaggagttcgagaccagcttgaccaacatggtgaaaccccgttcctacttaaaaaaaaaaaaaaaaaaactacagacacacacacacacacacacacacacacacacacacacttagctgggcgtggtggcaggtgcctgtagtcccagctactcgggaggctgaggcaggagaacagcttgaacccgggaggcagaagttgcagtgagccaaaaccgtgtcactgcactccagcctgggcaacagagcaagactccgtctcaaaaaaacaaaacaaaacaaaaaaatttaagaaaaataaagtatgggccaggcgtggtggctcacacctgtaaccccagcactttgggaggccaaggcggacagatcatgaggtcaggagatcgagaccatctgggctaacacggtgaaaccccgtctctacgaaaaatacaaaaaattagccgggcgtggtggtgggcatctgtagtcccagctactggggaggctgaggcaggagaatggcgtgaacccgggaggcggagcttgcagtaaccgagatcgcgccactgcactccagcctgcgtgacagagcaagactccgtctcaacaacaacaacaaaaaagtatggtgtccgggtgcagtggctcacgcctgtaatcccagcactttgggaggctgaggcgggtggatcacctgaggtcaggagttcaagaccctgtctctactaaaaatataaaaattagccaggcctggtggtgcacacctgtaatcccagctacttggaggctgaggcagaagaatcgcttgaacccaggaggcgaaggttgcagtgagccaagatcgtgccactgcactccagcctgggagacaagagagaagctccatctcaaataaataaaatatggtacataaattatcataaaatagtgtgtggccgttaaaacatgcacacacacacatacacacacacacacacagatcatgtcctttgaagcaacgtggattaagctggagaccattactcttagaaaactaacacagcagcagaaaaccaaatgcatgttatttctaagtaatagctgaggctgggcacagtggctcacgcctgtaatcccaacactttgggaagccaaggcaggcagatcacctgaggtcaggagttccagaccagcctgaccaacatggagaaaccccatctctattaaaaatacaaaattagccaggcgtggtggcacatgcctgtaattccagctacttgggaggctaaggcagaagaattacttgaacccaggaagcggaggttgcggtgagccaagatcgcgccatcgcactccagcttgggcaataagagcaaaactccatctcaaaaaaaaaaaaaaaaaaaaaaaaaaaattaagtaagagctgaataataagaacacataaaaacaaagagggaacaacagacactgaggcgtagttgaggttagaggacaaagaggatcagaaaaagtacctgcttggtgctatgcttagtacctcagtgacaaaataatctgcacaccaaacccccatgacacaattttagctgtataacaaacctgcatgtgtacccctgaaccaaaaataaaagttaaaaagaataaaaatctatgagtgggaaacagtgcaatgcaggtggaagaactggtttgtgctacagatagcggctcaggtagaggtatactctgatggatttttgtgtttatgcaagcagatgagattatgaacaggtggtccagaaccctcagttggtggggaaaacagtttgctgttgcagattcagtgtctgggggttgggatatgccaggagacttgtagacacttttgtaggtttttgccaggaaacactagaatcaaaaatgctgttgtaaaatttctcagcatggtgcctagtcctgggagaggtctggacacattaatatctagtgggtatgctcgtgagtgagagggaatcctgtggttacagctgtgggaaaagggggtctgctgtcagagtttctttactctaagtttggatcctctctcatcctgggagacctggaatcacaggacaatgggcagtgtgacagcctgtgtacaggagagtagagcctcccattcccagacacccagagttttattccaggccaggcctctgtggtatcttttttcttgtaccaaatctgtagagtttgctgaacatcaagacattctccaacaccaactcattgtctaacatttgaatttgaattctgacaccacccagagtcagcacagaccctgattcagggctcattttcacaatattgtcctaattgcagatgccagtcacaaaccccataggcccatctatgcttctgagctactgtttaaaaattatggactcctgtaacctccctcaagtttcataatttgatagagctactcgcagaactcagcaaaacactgtagttacatttaccagcttataaaaaatataacccccaaaagagtcaaatgtaagaaatgtataagacaaagaaaaaaaatggggaaagatgaagcacatagataatcctggtaaatagctgtgattaataaaattctctatcctttgtgttctccagaaacagtttatggaaagaaacatgctttccattatgacttagttggtgctcttttttcttacctatcacatagccaaacaaagactgtgcacattttcttcttcttctaattttaaaaaatcagctggctgggagcagtggctcacgcctgtaatcccagaactttgagaggctgaggcaggtggatcacctgaggtcaggagttcgagagcagcctggccaacgtggtgaaaccccgcctctactaaaaatactaaaaaaattagccaggcattttggtaggtgcctgtaatcccagcttcttgggaggctgaggcaggagaatcgcttgaacccaggacgcagaggttgcagtgagtgatcgcaccactgcaccgcagcctgggtgacagagcaagactctgcctcaaaaaaaagctgaatttttcttcagtggtcaaaataaaatactttttaatcaaacttcacttaagtttatctccgccccataggctccttaacattcagctacactcaatctgagtcgaaatacaaccgcattttatgtccttcctaaggacatgctgagttcgaggtaaaacattaatctagaatctaactttttcaccctccatttgccatttccctcccactttcgttctaatcttgtttgttccttccttgtctgcctgaacttgcaatttttaaagatcttatagtaggcatttctttctgttacaatactcctttggaattcaatttttacattaatctaactttggtttattttaaatagtctagaaactgcttcaaaacaataacttcatcttcacaagaatcctgccagttcttttccttcttaaccttaactgcatctctctgtggggccccagttttccagggctctgtagcttctctcactataaaggtttcttccatggctgggggtgagcaggctgggacatctgcgagagaggctcttcagaaaaaaactaattgggccgttaataaccttcttttgtaggctcaatattaattagccttagcttggagtcactaggctcatgctttgatttccattgtcagagttactaacttggttttcaaaattacgtgtgtgaaaaattcagcaacattacttaaacacaatgttcatataaggggatgaaattataaggcgctttaattttatacctcaataagaaaagcaaaagtatcaattcctttcagacaatacatgtcttattatttccattaaaaatcatgtagtaaacaattagtcatatgggaccatttctaggaggtaccaagttttatctcataaaattaagcatgaaactcagaagtcaagataacaggatacagaacagagatattcactgtcacaaatttaccctgcaataaaatgaagtgatattagatgtgtaggctgggcacggtggctcagcctgtagtcccagcactttgggagaacgaggcaggcagatcaccaggtcaggagttcgagaccaaccaggccaacatggtgaaaccctgtctccactaaaaataccaaaaaaaaaaattagctgggtgtggtggtgcatgcctgtagtcccagctactcgggaggctgaggcaagagaatcacttgaacgtgggaggcggaggttgcagtgaaccaagatcgcgccactgcactccagcctgggtgacagagctagactccgtctcaaaaagaaaaaaagaaagaaaacagatgtgtctgactcatgggtcaattcagatcatccaaccacttgagagattctcccactccaacctgctcacttaagtgctcagtgaccactctcttaggagacagtgcactatgctcaagtgagtgccccaagtgtattttactttgcaagtttttgtactatctcactgaagtcaggttttttttctttcttttgtcttttgggatactattttttctttcacaaatcttagagcatttagggggcagaaattatttctgttttcccctcaatatcagcatgtgattggtggaccagcaatctgtctccaagaaatggaagctgggttgggtgaagacaattgtaatgtctcaaggggttagcttttcaaaggaagagtacaccaagagattccatcttttccccagggtatccactggggaggctgcactccctacctcaggttgtcctatgaaagaaaacgacttaggagctgatattcactagatactctagcagacatagccacagcagttatcttggtttattcagagacagtactaaaacccaggaacaagaaaaaacgacagggttgctgaggacaaatcactccataacgtttgcaaaataaaaacatcttgacactaaaacattatcataagacctttgtgcctagggaagacaaaagaaaaagaggcacagagactttttacaattcactatcaggggattattctttgctttcttctcatgggaaatacttacaaacagaaaacatatctttttctttttctttttttcaattttaaatagttttatttaagacattgcattttccacttacaatacagtgtttataaagtgcaatgctatttccttcccctgtgcatatgttccatattcaaatactgagaatgcccagtaacttactatagcagcttaactttttaaacctcccacagaatttgctacaaatttaggtccttcaaatgagaaaacatctttttcaatatgccatctaatgctttgtcaaaaaatgattaattaaaatacggtatataaaaggtacactaaaaaacaaataataaataatgtaaattagggagaggaagttggcatttgagattttcagaagaaactgaaaattcagtattttactgcaagccagagttaggctgcagaaatggggtgtggggggttgccttgagaccctgcttgggacccatgtgaaacatgcaagggaaaatcagtcccacgtggcggcaaatagactgaggtggctccaatccctggattcctaattttaaaaaatctaactcaaatgcatttttttaatagaaattactacattgggggaaacaaaattcaggcttaaaaaatgataaactgccaagtaagttctgattacacaaccaggaaatttctaggcttaaagtgaaaattaagaaactacgtaaatgtacctaaccgattactgaatttgggtattttcatcatgcatctttccttcaagatcttttcatggcccacaaactacaacccatagctgggagctctacaatttttgaaccgctccttgtttaaattcttaagtactgtcgcgataattcccatacatttttaataggcgaaaagaggaactaggaaccccataaaccaaacaaaagctctttccattcatgaaccctcacccccagcaccccgagtcaggattctgccgacgaccctctcgtggtccctgcacaatctgggagagacgcggcactgcgcgtgcagagctgcccagagagggctccagctcagggcacagtcactgggcagggaagagacaggacgcccggagcctggctgtcagcgcagccgccatcttatcgctgaaggggactgaggccgagctaggcaaggagaactaggggcacggattgtggagctgacagcggggaggcctgagtcccgccacagcctcttcccaccggttccaaccagccccttctcctctctagggatgtcggactcggcactctcaccatttctaggcttccaaggggtcctggcatcttagctgtggattcccaatacctgcaggtcacagggccacagaggctgggcctctacgagcagaggacacagaagggcgaagacgagaccaggaactccggctgcagcgagagacaaagaccccgccacatcccggaagccgccctttccgctccaaccgcgtgcctgattggacagttcccaggccagcgtctctgacttgttaacgtttaagatccctcgccctcacgccctgagtgacagaagatgtgaccaaatgctgggctgaatgaagaaagactgacagccgaaggtgcccccttttcaggcagggcttcctccctgaggtgagctaagcccacccagagggtgtttgccttaaaccttgtatataaggtctcatgtatttgtaaataatatactatacggctgctcacacatggaaagaatagaataacaattatttttaaatttctgctttttttttttttttgagacggaatctcgctgtgtcgcccaggctggagtgcagtggcacgacctcagctcactgcaacctccgcctctcgggttcaagcgattcttctgcctcagcctcccgagtagctgaaattacaggcgcgcgccaccacgccctgctaatttttgtatttttagtagagacggggttttcaccatgttggtcagggtggtctacgatctcctgacctcatgatccgcccgcctcggtctcccaaagtgctgggattacaggcgtgagccaccgcacctagcctgaatttcggcttttataaccttcctggctctggtcctttgaacaggcagcctgagatagtttttgttttgtgttaagatggagtcttgctctgtcgcccaggctggagtgcaatggcgcgatcttggctcactgtaacctctgcctcccgggttccagtgattttcctgcctcagcctcccgagtagctggaattacagtcatgcgccaccatgcccggctaatttttttgtatttttattagagaccaggtttcaccatgttggccaggctgaactcccaggtgatccgcccgctttggcctcgcaaagtgctgggattacaggcgtgagccaccgcgcccaactaacctgaggtttttaaaaggacacaatccttctaagtaaaatgtgagccacatgtgaattttaaatttcctactagccaaactttaaaaacaaggaacacacggggcacggtggctcacgcctgtaattccagcactttgggaggcgaaagcgggcggatcccgaggtcaggtgttcgagatcagcctgcccaacatggtgaaactccgtctctactaaaaatacaaaaattagcgtggtgtggtggcgggcccctgtaatcccagctactcgggaggctgaggcgggagaatggtttgaacctgggaggcagaggtcacagcaagctgagactgtaccactgtactccagcctgcacgacagagtgagactgtctcaatgaaataaaaataaaaatactttggccgggcgcggtggctcacacctgtagtcccagcactttgggaggctgaggcggatggatcatgaggtcagaacattgagaccatcctggccaacatggtgaaaccgcgtctctactaaaaatacaaaaattatctgtgcgtggtggtgtgtgcctgtaatcccagctactcaggacgccgaggcaggggaatcgattgaacaagggagttggaggttgcagtgagccaagatcgcgccactgcactccagcctgggcgacagagtgagactccatctcagaaaaaaaataaaaaataaaaacgctttttgatacgtgtgggctatttatgattttcaacactgattaaaagtactgtgcctgaaccaacctcttaccttaaaatcaaatgactatagacagacctgctaggaagacatttcatttctttcttactttttttttttatttttttagagtctggctctgttgctcagactggagtgcagtggcgtgatctcggctcactgccacctcaacctcctggcttgaagccattctggtgtctcagcatctcgagtagctgagaattcgggcgtgcgccaccatgcccagctgatttttctatttttattagagatggggttttgccatgtttgcaaggctggtctcaaactcctgaactcaggtgatccgcccacctcggcctcccaaagtgctgggattacaggcatgagccaccccgcctggcctgtattttgatttttaaaatagcagagctgctgttgaagatttcaaagtcagaagcagccgtgggacaaatctcagaagcacacgtggaaatcacacacagtgaatgcatccctcaccctgaaccaattgttttcacccaagtctgcatgtaaaaatcacctgggggggtctttaaaaatcccccaaacataagttgccacaccccaattaaatcaggattcctggagtggaaactgggcaacagtttagtttaattatctctaggtgatgacagtacagccaagctcaaatgcctctgctgtaaaccaacacttttagtgacctagttgcaaattatttctcaaatgaatgaaaaaatgtttgtccctaagtcatggcctttcagtcttaccaatattaccaaattattgttctttgcagaaccaactttactattggttttgttcctgaatcaacccagttccatacacattgaatgcactctatgtgcaaggcactgtgctaggtgccctggcattggtgatcattactgtgggggaagaattttctggaataaaggttgcattcccccaaaattaaaaacatgccatgaaccgaactggggctaaaataaaaagacgtatggtctcatttaagagttagggcttgttcgggtgcggtggctcaaggctgtaatcccagcactttgggaggccgaggcaggtggctcatgaggtcaggaaatcgagaccatcctggctaacacggcgaacccctgtctctactaaaagtataaaaaaattagccgggtgtggtggcacgtgcctgtagtcccagctactcaggaggctgaggcaggagaatcgcttgaaccagggaggtggaggcagcagtgagctgagattgcgccattgcactccagcctgggcaacaagagcaaaactccgtctcaaaaaaacacgttggagtggggactgtcagaagtttgcaccttatgcaaaggacacaatgacatacctagtcctgactggtttgtcgcaccttatgtaaatgaagcacctctcccgatcagcttgtttataaaatctcttgggcttttcactttaaaatggcaatcctttttcctgggagtcctctctgtgccagagagctttcttcctttcgcttattaaaattctgctctaacctcacctttggagtgtccgcacccttgatttcattggctctgagaccaagaacttcatgtgacatcccagataatgaggacagattcagtgccttctcaatagtgtcccaccagtgaccctcacagctaaagcacacatggggcagaaacatcaatcacctgcctgggacggccaggtgggcaggagcaagcagggactcggtgagaaaaccagaatgtgtgttcaagggcaggggccgaggattcagctgagttggaaaattccgtttctctttcagaatgtgctcctctcctggtatctgcttatctcctggaatctgagacacaacatagagcaacccccaggccagccatgactggagcctcccaagttgcagggaagggccctgtactaggccaagaacctatcctgaccagttcacccaccctgtccaccaggtgcaggcagaggccagggaccccaacttcagacagaggtaggcagcagggtcaccgcctccggcaatcccatgccagggattacagggtccctggggagacctagcagtggctgagttgagagattcaggcagggggatcccaggtgaaaaagtaagggactgggcatgtgtggggactaagagggaagtgtgtggctgtccctggagaagtgacagcaaggcacagacaagctgagtacccagatgccacacccaactgtcaggtacacaagccccagaatcccctaagcaaccccaggaagggttttatttaatcaagaaaaaaggagtcccacctccactcacacaggcactggtccttacatacattagagaacagaactcttgctctgcccaaggccagggaaagagggcaatgtctctctatcccgtgggtcacagaccttgtcctgccagaacacccaccctcagccccagaaaggtacagatgacaaccagggtgcacatggcaaccactggtgcaacccgaaaggagctgagtcctgtagggactttgggcctggggagtgcttcccagtcacagagtctttctaattgtttcactcactagctttgcccctcagtttcccccactgtggcaaaaagtcaaaattctatcctgcaggctaggggaccctgagaggtcaccacagcccattaaatgcctgcagcatgtgaaagtggggggcagtgagaggcctccctgccctgggtcttttgccctaggactgatttttatcaggccaaggccaggccagcctgctgaggaaggcaatataacctgcctggggaaccttgctcccaattacaggtcactacatttaaggacctccaatgcattagggcaggaaaagggtggaatgggggtagagcaacgcttcatcataaggggcttgggtcaaccaattgttttctcaattgagaaaaacaattcagactcctgtctgaagctgaccactcaaagagatttcgattttcggataagaaaaggcccttgggtcagaaaacaagatattctggttctggactctgcagctgtcttgggtaggggagttttgccagctttgtgctttcattgaggctaagggggtggcggggggggggcacgcggaagagactccgaagccaagggtgagagtcctgccttcctgcctccgcagcccactttccaaaagcagaggttgggcagcaaagtttcttaacaaagtcagaaaaaataatatccagaccaggcaggctaataaagtttaccaggattatccggcctaatcaccgaaacagccctgccatattcgtcctctgggacaggtgaggaaactgaggttggaggaggacaccgggagcctggccgggccactggcagcctggagccccagaggtccgggcattcaccgccctccaacaccccgccccccgcccccaacccccgccccttcttcccggcctcaggtgacttcattcccagctcattcacttgtcaataattcaggcccgcggggccaccagccctccctcaagcccccccacactcatcaggtgacgacctccctgtgtgtggctgccaggctgggggtgggggtgtctgtgcttccctcgcccaatctgagagtggcctgttccagggggcgggcttcctctttgtttggcagccaggagtctggagcgcaggtgccgggcaggcagcactgggagcgctcggcgacttggctggaggccgaaggtgccgcccctggggaaccagagcgcctttgcaaggtgggctcggcgtacactcccctatccttctgtggcccccgggcccctcctagaagaccgtcctcatctccgaggaccttgaccgccagcagccccacacccgctccctctgcctggcgttgggtgcgcacttctaggggcagacggatctaaggagcccagcgggcttgacaggcagtggggcctccagagactgtcaccgcgttatgctggccactgccgggcaggggctggtcttagctgacaccctcacctccgccctccagattccagcctctgactctggccaatctggccaggacctggggtctggggccgggacagtggacgcccctgggccgggctaccagctggggcctcgcacttggatggggaccttaaggctccaggcgccacacacaccagtgcgccctctctggccgtgaatttcagggaggggcggcagcagagcccgcgggctggcctggtggggacgatcaccttttcccacctagtcgcccttgccagtccccgcgtcgcctgcagggccgcccctcctccgcccgctggtccctccccacccgcagctctccagtcccgcgcggctcggtggccagggctccaaggcggggccgcccacgacagccactggcagggatagcgggggcaaatttcccagagcgggaagcctgccccagccggccctacggcaaagatggctctgaatccgagcccccgacacccggcccaacccacccctacagcaccctgcgtggctggctgccagcccgtcgggtacctgctcggtccctcgagctgggggccccggcagggcgggagcgatccaaggccaccgcgcggggccagagcccaaaccccaatcccagaccgcagggaccccgcccaccaggtaccgagacaggacggcctggcaggtggctggggaccggggtgtgtacctgtgggggggtcaaacaactggtcaaaagtggctttttgatttcccaaaggtaaaggctccttcgtaattatgtttttttttcttatttacttaaaacggatataatctagttagatttacccataattctgtcagtaaattcgagcacacttttattaatttttctcagtttaactagttcttttgtttgtttctatgttaagaattttaaattctacctgtaattagtagtgtgaattcaaaagtatctgagacaggtctcaatttagaaagtttattttgccatggttaaggacacacctgtgacacagcctcaggaggtcttgacaacatgtgaccaaggtggttggggcacagcttggttttatacattttagggagacaggagacatcaatcaatatatgtaacatgtacattgtccagaaaggtgggacaacgtgaagctgggtggcagcttccaggtcataggtagctaaaggacaaatggctgatttttgttttttttgtttgttttttttctttttttttagtttctgattagcctttcactgaatatgcaatttacagcgatagtcacttatgcgttagtctggcttagtgaaacaatagcgcaaagaaagcaatcagatatgcatttgtctcaggtgagcagaggggtaatttttgagttctgtctgtcctttgtacacagggattttttttgtgggcaaattgtgagggttgtctgtagcctttttctcttcatagttatcttatttggaaatagaatgggaggcaagttcccagattggcttttccttttggcctggtgatttgggggtccagagattcattttcctttcatatttcttcccttttctttttaaaatctttcagagaaagcattttagaaaaaaataagtcattggtttcagattttgcctgatctcttacggctagaacagtttattccgagaagggtaggtcccacattattaggaaagatcatttttagcaggttgtgaagtctcacatccttcaaagagaagcagggaaaggaagaaagaaaaacaataaaaacaaaaaaagcaagaataattttggaaaatcaatataggtcatattactctgaagtctttacatcaataggcaggtataaaggtagtttatgtatttaaataagttgttttctttttttcgaagtttaagtttgtctggcttcagtttgcagggctttaagaaagcacaacttaggttttagttatttgaaatcagaaaaaaaaaatgaaaaaagaaataaaaaaaggaaaaaaatgtttgagacttgtagccagggacattgtagaatttagtccaaactgtaaaaagtaataaaaattgcaaaaaaaatcagttaagaccagaaactaactacaggtgtactagagtttattctgacacagaatttttctctctttagtcccattttcactaaagacaaatcataggacgaactcacttgtaaaataagttttagtcttattatacttagccagagaatttgaatcaagtcagcaagaataattatttcccttataggctccactttttttcttatattggccttgctggaactttattttattatggaagctccgattcaactttaatgtcttaagcccatcatgtgcctgcaaatacctgtattagtggggtgaatatctcacctcatttaaagaatttaaaattgtattagtcttcttcaggcttcagaagcaatgctaggcttctgaccaatacataagctcatgtgggctaagcatctacatggagagtaaacacccatcagtcatgagaaacttcaaataagacagggcgtatgctatagaacttctcaaaacttgggaatctgaccaattctctgtgtttcagaacatcctgagacacaaactaaaagattaagcattattgactaaatcttgaaggctgcacatttgaatgctagctgacaatgtcagccactggcccgataatgtaagctggcagcctcctactgctctcttgaagtctcacctgtagagtagatgcactacccagggattcttctaactggaactccagatggctgttttttggaacttcccagcactgcttgatctggatgtaggtatcctcccgaacttggtgaatatatatgtgtatatacgtacatattttccttttctcccactttagcctttgctaagtttaccattatactgttttactacattaatcattaaacttttctcctaactgcatttgagtgtaatattgtggtttcttttgctcatgaatcctcaaacctatgatgaaagtaaatctttcagcaaaacacccccaggttacaaaaaacttgggctccttggcctgtcagaaagtggaattctttacttaccacaggtaaggaacctgcacaggaactgtgtagaagaggtgtaaggccagcttgttcgaagagcttatattatttctataagccaactatgataccttaaaggggtctgtatctgaaagcatgacattccaggcaataccttggtaaaacaaccagtgtctccaattgtgttctgttacaaaaaaaaaaatagattttttttttgagacagtgtcttgctttgtcaccatggctggaatgcattggtgcaatctcagctcactgcaacctctggctcttgcacttaggtgatcctcccacctcagctcccaagcagctgggactacaggtgagtgccatcatgcctggcaaatttttatatattttttggtagacagggggcatctcataatgttgcccggactggtcttgaactcctgggctcaagcaattcacccaactcagcctttcaacgggctgggatttacagttgtgagccactgcacccagtaagaaaatagatttttattgcacttaatgcaaataactatattgttataagttaagaatattcacaacagggcacagtggctcatgcctgtaattctagcgctttaggaggccgaggtgggtggatcacaaggtcaggagattgagaccatcctgaccaacatggtgaaactctgtctctactaaaaatacaaaaattagctgggcgtggtggcgcatgttagttatcccagctactcaggaggctgacgcaggagaatcgcttgaaccagggagtcagaggttgcagtgagccaagattgcaccactgcactccagcctagtgacagagcaaggctccacctcaaaaaaaaaaaaaaaaaaaagggaatactcacaactagttttcaaattttggagaaatcaggtggagagaattatgctccaaattttgtttataataatatattttactcaatctaattctctgttcaagttgccaagaacctggacaccctccactagtaacacttcctctatgctgcataacttttgtagtacagagttgtatgtcttttaaataatctacattatctgactttttccatgatacattttgtattttgtatccagttggaaaagcatttttattatctgtgcaaataaatatattctcacttattttcagctgataaccttagccacatatttttaaaatattttttaattatctgtaagatgatataataatcttactttatatgttctgagtgaacatgtaagtatctggacactatgtaatcaactaatttttataatacatttcaaatgcttcttttatcagacactctacttattttaaatgcatccttttaaaatacattctatgaatggataaaaaatgaccagatgtcataaatatatgcgaaggtaaatgtaaatgcaaatacacatctgtttagacaatgctgctttcaaaatcacagagaatggccactttttaaccttttattgtaattaaataaaataacagattttccatctttttttttttttttgagatagagtttctctgtcacctaggctggagtgcagtggtgagatctcggcccactgcaacctccacctcccaggttcaagtgattctcccgcctcagcctcccaagtagctgggattatagatgcccactaccatgcccggataatttttgtatttttagtagagacgaggtttcaccatgttggccaggctggtcttgaactcctgacctcaggatctgcccgcctccgtctcctgagtgccgtgtttacaagcgtgagccacagcaaccagcatgtttaggggttttaaaaagccccccgggtgatttttacatgctggctggagtaaaaacaattggttcagggtgggggatgctttcactgtgtgtgatttccatgtgtactgcagagatttgtcccatggcagcttctgactttggggtcttgaaaagcagctctggcattttaaaaatcaaaagacaggatgggggtggtggtttacgcctgtaatcccagcactttgggaggccgaggcgggtggatcacctgaggttaggagtttgagatcagcctgaccaacatggtgaaaccccatctctacttaaaatacaaaaattagcttagcctcagctactcgggaggctgaggttggagaatcacttgaacccaggagggggaggttgcagtgagccaagatcgggccactacactccagcctgggtgacagagtgagaacctgtctatagtcacttgatttcaagttaagaggttgtttcaggcaaagtacttttagtaagtgttgaaaatcataaatagcctacaaatatcaaacctggtttaactttttttttttttttttgagatgaagtctcgctctgtcgcccaggctggagtgcagtggcgccatctcagctcactgcaatctccagctactgagttcgagcgattctcccgcctcagcatcccgagtaggtggaattacagtcgcccaccaccatgcccggctaattttttttatattttagtagggacggggtttcaccatgtttgttggtcaggctgctctggaactcctgacttcaggtaatccagccatggcctcccaaagtgctgggattacaggtgtgaaccactgggcccagcctattttgagattttgtttttgtttttgtttttgttttgagacagagtctctctctgtcgcccaggctggagtgcaatggtgcgatctgggctcactgcaacctccgactccctaattcaatcgattcccctgcctcagcctcctaggtagctgggattacaggcacatgccaccatgcccagctaatttttgtattattagtggagacagggtttcaccatgttggccaggatggtctcgatctcctgacctcgtgatccacccgcctcagcctcccaaagtgctgggattacaggcgtgagccacggcacccagccctattttgagcttttgacataattgccaggcttcccgaaatcaaatttcagcttaaaaattgtcttctttttgacccttaacttttgggtgctacagagcaccaacgcagcatctaaaacaatgataaacagaattacttggtatgtttaattacatgggaagcattgtcaaattaaaaacactttttgggtcaggtgtggtggctcatgcctgtaatcctagcactttgggaggctcaggcaggtggatcacttgaggtcaggagtttgagatcagcctggccaatgtggtgaaaccctgtctctactaaaaataccaaaattagctgggcatggtggcccgctcctgtaatcccagctactcaggaggccgaggcaggagaatcgcttgaactcagtagctggaggttgcagtgagctgagattttcccactgcactccagcctgggtgacagagctagagttcctctaaaaaaaaaaaaaaaaaaaaaacccaagaattaaataaaaatgatgtttgaccttcaacttatattttaataaatatgtgattaatatttatatcaaaatcatatgaaatttcaaaaattttatgtatctgagtatattatagtagtcataattgtgattttgataaattattgtaggccacagatataatcaatttttgtttctttataaccattttaagttatttccacagttaatggtttaattctgatgtagtttctaaaaacctcaaaagcttgcaaaatcctagagtattatgtctttaaggaggttcatgaaaagttggaaaaggcccacacaaattgagtacaggtttctgaccattttaggatcatattatttattctggtaaggcttgtgagaattctaataaacagaccaattcttataaaactgctaacctaggcaaatcaaaagtatttgaatattaggaaaatactctgtgtaaaataatgtggcagagtattttaagatattatgctaaaacagcctgtacaaaaattttttagatataccattttagtaaactctgtggtctaagtcaaactacctatgataacccctcagttatcagagctatgctcctaaattggagaaacaaacctagtatttaagaggacataaatttaatgttaagtgtggactcattaagaacctagacagccaacagccacttactcattcctgagttcttaaaacttccattcttaacagctctgcattccattactcatcacagaagagataaaataatctaaattgaatataaattaagtgtgtgtggtgattattctataataaattacgaaaataggttaagaccaatgttttcttatcaaacatttaatcctgagaagacaatcaaaacttcatgtatgtttctgctacctgatgggccatttaatcatggttacaaaaattttattcaattatcatttttaatacatattttctggtaatataaaagctttcttatgcaagaaaactgatgttataacagtagctaaaaggatataaataaatacatttttctcatggaacatttctgaaaaagcctccaatgataaagatgtttatttcactagacaaattgtaaaactgttacataaggaattacagatacaatagtattgtgcaaagctaactacattgactggattgcttttgtaattgcagattgatgacaatcagatccactgagagaggaaaaaatatgttgtcctggtgggtgtggttgctcatgactgcaatcccggcactctgggaggccaaggtgcgtggatcaggttaggagttcgagcccagcctggccaatatggtgaaaccccatctatacgaaaaatacagaaattagtcgggcatggtggtacgcacctgtagtcccagctatttgggaggctgaggcagaacaatcgcttgaacccgggaggtggaggttgcagtgagccaagattgtgccactgcactccagcctgagtgacagagtgagactgcatctcaaaaaaaaaaaaaagttggcccatataatatactcattggaaggcctatgcacctaataaaagctcatgtatcttctgctactgaagtccagtgttttttgttttttttttttaatttactttaagttctgggatacatgtgcagaatgtgcaggtttgttacataggtatatgtgtgccatggtggtctgctgcacctattgacccatcttctaagttttgcacccttgcccccaacctcccaacaggccttggtgtgtgttgttccccttcctgtgtccatgtgttctcattgttaaactctcacttatgaatgagaacatgaggtgtttggttttctcttcctgtgtttgtttgctgaggatgagaccttccagcttcatccatgtccctgtaaaggatattatctcattcttttttatggctatgtagtattccatggtgtatgtgtaccacattttctttatccagtctatcattgatgggcatttgggttttccatgaaagtctaatatttctttttttttttagacagagtttcactcttgttgcccaggctgaagtgtaatggcataatctcagctccctgcaaccttggcctcctgggttcgaccgattctcctgcctcaacctctcaagtagctgggattacagacgcccaccacaatgcccagctaattttttgtatttttaggagagatggggtttcaccatgttggccaggctggtctcaaactcctgacctcaggtggtccacccacctcggcctcccaaagtgctaggattacaggcgtgagccactgctcctggccagaagtctaatatagcatattttcaccaagtgaagaaagtcttgaacagtctattgactgaggatagtagaaccctttataatctagaatccagagactgagtcttactgccatctaccctgaagcaagacttcaagaccttgaacattgggttcatagtctcacaacttagaagggcctatccaaactctttcaattgtaaactcataggagatcttaagcaaaggtaagcaggaaagtttctcctcaaaagaagatagcaatcttgatctagacagctttctttataagatcaaaaatcaaggccgggcgtggtggcttacgcctgtaataacagcactttgggaggccgaggtgggtggattacgaggtcaggagttgaagaccagcctggccaacatggtgaaaccctgtctctactaaaaatacaaaaattagcaattagccgggtgtagtggtgtgcgcctgtaatcccagctactcaggaggctgaggcaggagaattacttgaacctgggaggcggaggttgcagtgagccaagattgcaccactgcactccagcctgggcaacagagcaagactccatctcaaaaaaaataaaataaaataaaaagtataaaaattagctgggcattgtgacacgtgcctataatcccagctactcaggaggctgaggcaggagaattgcttgaatcaggatccaggaggcggagtttgcagtgagcggagattgcaccactgcactccagcgtgggctacagagcgagactccgtctcgaaagaaaaaatcaagacatctctgctatcatagcagagtttgttcacagttttctaatggctctacaaacaacagaaataaaaaaggaatctcttgtatgcactcatggggtatactcataggtagagaattttgctgacaacattatatataacaaaacttttgccttgataggtaaaagatgaagagctaatgtgggtgagaagttttaatgaaacatttgttgcctcataatttcagaaaaagaatatcgatccactgctttaaacttacttcataagttaaaaataacttcttcagaatgggttaaagagcattgccagcaggccattactcttctgaatgggcatcatttgttagatcattttttccatggcttagcataaatgaagcaatggtaagaaatttatccccaaaaatagggctctatagcagattctaatgtaaagactatggttacgcaacaggtgttaaatgttgttactaaagttgtgctaaataatagaatttcttttgattacttactggataaacagagaactacctgtgctgttgctgatacttgtagttgcacatggtagaatacattgggtattacaaagatgcaattgtaggggattaatgaacaggctgcttggttgaaatgagatcatttatctagctaattatttaatctattgaattttagttggttgttcatggggaccctggctaagaagcatggtttcaacattttttttttttttttctgagacaaagtcgcactctgtagtccaggctggagtgcagtggcataatctcgactcaccgcaacctccacttcctgggttcaagtgattctcctgcctcagcctcccgagtggctgggattacaggtgcacaccactgcacctggctaatttttagtatttttagtagagacggggtttcaccatgttggccagggtgatcctgaactcctgacctcaggtaatctgccctcctcggcctctcaaattgctaatattacaggcatgagccactatgcccggctggtttcaactcttggtattatcctcctgaaaatcaaaatagtagtctccctactgcaccgtattctctcaaaagttctaaaggtttgcatacagtcatctctagaatgtcaaatggtgtctttttaatgggaatgacagaaactcaaagacatatgtgactatgaagacaccataacctgtgaataacattataaggacaaaaaccctaaataatggaaattgagagtggcactaaggccctgagttttggtcacactctgacctacgtaagaactttaccaaaaagggagagttttaaaaacaaagttggctcagcgcggtggctcacacctgtaatcccagcactttgtgggccgaggagggcagatcacaaggtcaggagatcgagaccatcctgccaacagggtgaaaccctgtctctaacaaaaatacaaaaattagctgggtgtggtggtgcgtgcctgtaatcccagctacttgggaggctgaagcaggagaatggcttgaacccacaaggcagaggtttcaatgagctgagatcacaccactgcactccagcctggcgacagagcgagactctgtctcaaaacaaaaagttattggagtccatcattgtaaactgagcttgtgcactagttccaaacagaccaaaccaaactgaaccaaaacaagtcacttgtgctaaatgtgacataatcaaactgaaaatttaagaaaataggtagatcctaaaacaggccaggtttatatttttcttctggaaacagcagatttcaacacaaggaagccccttctaaccttttaaaaataaataataggcctggtgcagtggcttatgcctgtaatcccagtactttgggaggctgaggcaggcagatcacctgaggtcaggagttcgagactagtctggccaacatggtgaaactctgtctctaccaaaaatacaaaaattagccagcagtggtggcaggcacttgtaatcacagctacttgggaggcccaggcaggagaattgcctgaagccaggaggcggagtttgcagtgagccgagatcacaccattgcactccagcctgggtgactgagcgaaacttcatctcaaaaaataaaaacacaaataaaataaaataacctgaatccatgtttccacttaaaaaacccccacagttctgcttttttacagtaggatttgacactaaataagtaaatttttatttttattttttgaaacagtcttgctttgttgcccaggttggagtgcagtggcgcgatctcggctcattataacctccgcctccccagttcaagtgattctcctgccgcagcctcccaagtagctgggattataggcacttaccatcatgctcggctaatttttgtatttttgtagagacagggtttcaccatgtgggccagcctggtcttgaacgctgaccttaggtgatctgcctgcctcggcctcccaaagtgctgggattacacacgtgagccaccatgccaggccaataagtacatttttgatggtgacggagtgatattaatatctaaagttggtttttttttttttttgagatggagttttgctcttgttgcccaggctggagtgcaatggcgcgatctcagctcacgcgcaacctctgcctcccgagttcaagcaattctcctgcctcagcccctctagtagctgaaattacaggaatgcaccaccatgcccagctaatttgtatttttagtagagacagggtttctccatgttggttaggctggtcttgaactccagctcaaaaaaaaaaataattatgggagccaccacaaaaatattaaagaatttaatcaaagagagttgttcaaaaattatagagcacccctatgggttgtagtttgtggtccattgcaggggctttaagaaaagacttttataaagtgcatgatgaaaaaatccaaattcagtaatcagatatagttacgtagtttcctaatttccaccttgagcctacaaatttcctggttatgcaatcaaagcttaattggcagattatagttggttaaacttgaattttgtttcctctaatgtagtaatttataaaaaatcgaactcatttgagttcgatttttttttaaataggaatccttcttttctcttctctcttctcttcttttctttgcttctccctcccttccttctttctttctttcttttttttgagacggagtttcgttattgttgcccaggctggagtgcagtggcgcgatctcagccaacggcaactccgccccccgggttcaagcgattctcctgcctcagcctcccgagtagctgggattacaggcacccgccaccatgctcggctgtttacatgtttttcaagcagggtctcgaatgtaccccccaataactttttttttttttttgagatggagtctccctctgttgtccaggctggagtgctatggctcaccgtaacctccgcctctcgggttcaagcaattctcctgtctagcctcaggagtagctgggattacaggcgcctgccaccacgcccggctaatttttttttttttttccagatggagtctcgctcttgttgcccaggctggagtgcaacggtgcagtcttggctcactgcaacctccacctcccgggttcaagcgattctactgcctcagcctcctgagtagctgggattacaggcatgcaccaccatgcccggctaatttttgtatttttagtagagaaggagtttcaccatgttggtcaggctggtcttgaactcctgacctcagatgatccattcacctcagcctcccaaagtgttgagattataggtgtgagccactgagcccagcctttttttttttttttttttttgagatggagtctctctctgtttcccaggctagagtgcagtggcataatctcagctttgcctcccggggttcaagcaattctcttgcctcagcctccccagtagctgggactacaggtgcatgacaccgcatccagctaatttttttgtttttgtttttgtgtttgtgttttttttgagttggagttttgctcttgttgcccaggctggagtgcaatggtgggatctcagctcaccacaaccttcaaatcccgggttcaagggcttctcctgcctcagcctcctgaggagctgggattacagccatgcacccctacgcccggctaattttgtatttttagtagagatggggtttctccatgttggtcaggctggtctcgatctcctgacctcaggtaatctgcctacctcggccttccaaagaaagtactgggattataggcgtgagccatcatgcctggcttttttttttttttgtattttagtagagatggcttttcaccatattgggcaggctgatctcgaacttctgaccgcaggtgaattgcctgcttcagcctcctgtttttaatattttcatcataaaatctttgtcagtttctatgtctagaatggtatttcctaggttgttttccagggcatttcttccttataattttaaattttacatttaagtcttgaattcatcttgagtttatttttgtatatggtgtaaggatggggtgcagtttcaatcttctacatagtatttgctagttatttcagcatcatttattaaatagggaattattcccgcattcctcttgtcagccttgtcaaaaatcagatggttgtaagtgtgaggcattatttctgggctctctgtcctgttgcattggtctatgagtctgcttttgtactagtaccatgctgctttggtgtctatagccctgtaatatagtttgaagttgggtaatgtaatgcctctagctttattctttttgcttaggattaccttggctgtttgggctcttttttggttccatatgaattttaaaatagtgttttttagttctattaagaatgttgctgggtgtggtggctcacgcctgtaatcccagcactttgggaggccgaggtgggtggatcacaaggtcaggagattgagaccaacctggctaacacagtgaaaccttgtctctactaaaaatacaaaaaattagccaggcgtggtggcacccgcctgtagtcccagctacttgtgaggctgaggcgggagaatcacttgaacctgggaagtggaggttgcagtgagccaagaccacgacattgtacttcagcctgggtgacagagtaagattctgtctcaaaaaaaaaaaaagaaaaagaaaaaagaaaagaatgtcttggtagtttaatagaaatagcactaaatctgtaaaaaaattttaggcagtatggctattttttttttttttttttgagactgggtctcactctgtggtcaggctggagtacagtggtgccgccttggctcacggcaacctctctctcctgggttcaagtgattctcccacctaagccttcccagtacctgggactacaggtgtgtgccaccacatcatctaatttttgtatttttttgtagaaacggggtttcactatgttgaccagcctggtctcaaactcctgacctcacgtgatccagccacctcagccttccaggctatgaaacagttttccatttgtttgtgtcatctctgacttcttagcagtgccctgtaattttcgtcttagagatctttcacctccgtggttagctatattcctagatattttattctttttgtggcaattgtgaatgggattatgtttttgatttggcttttggcttggatgttttttatgtacagggatggtactgatttctttacatttattttttatcctgaaactttgctgaagttgtcagtttaagaagcttttccaggccaggcatggtggctcacacctgtaatctcagcaccttgggaggccaaggcaggtggatcacctgaggtgaggagttcgagatcagcctggccaacattgtgaaacccgtctctgctaaaaatacaaaaattagctgagcatggtggcgcatgcctgtaattccagctactcgagaggctgaggcaggagaatcgcttgaacccaggaggtggaggttgaagtgagctaagatcatgccattgcactctagcctgggtgacagagcaaaactctgtctcaaaaaaaaaaaaaaaaagaagaagcttttctgcaaagattatagggttttctagatatagaatcatgccatctgaaaacaaggataatttgattttttttttctttttggatgccttttatttctttctcttgcttgattgctctggccaagacttccaattctatgttgaatacaagtggtgagagaaggcatccttgtcttgtgccatttttcaagaaggaatgcttgcagcttgtgtccattctgtatggtatctatggatttctcataaataactcattattttgaaatatgtgcttttaaggcttttagttttttgagggttttaaacatgaaggatgctagattttattgaaatatttttctgcatctattgaaataatcttgtgattcttgtatttagttctgtttatgtgatgaatcagatttattaatttgtgtgcactgaaccaaccttgcatcccaggactaaagcctaattgatcatagtgcattagctttttaatttgctgctggatttgctttgccagtattttgttgaggatttttgaagcaacattcgtcaatgatattggcgtgaagttttcttttttgttttgtttctatcaggttttggtgtcagaatgatgttgttcttacataatgagttaagggttaagggggagtcccttcttttcaatttttaataatagttatagaaggtataataccagcttttcttcgtacatctgctaaaattcagctgtgaatctgtctggtctttttttttcccctgtttttggttggtaggctatttactactaattcaattttggagcttgttattggtctattcagggctgcaatttagtatttttttagtcttgggagagtttactcatccaggaatttattcacttctttcagattttctagtttgtgtgcatagtggtgttcatagtagacttcaatagttatttgtatttttgtgggactcaatggtaatgtcccttttgtcatttctaattgtgtttatttggatcttctttcttcacagtcttgctatggttcatctcattattttttccaaaagatttaactcctggatttcttgatactttgtataacttttcatgtctaaatctcgttcagtgcagatctgattttggttatttcttgtcttctgctagcttaggggttggtcttctcttgcttctctcattcttttatttatgatgttaggttttaaaatttatttttaacttttttatttgagtttttagtgctataaagttttttcttaagactgccttagctgtgttgcagagattctggtaggttgtatcttcgttgtcatttgtttcaaagaacttcttgatttttgccttaatttcattattttcccaaaagtcatccaggttcagattgtttaatttccatgtaattatatggtttcaggtggtttcctatatattgaattatatccttatcaagctgtggtctgtttgtgtttttggtatgattttgggaagactgaatttgctgagaattgttttatttctgatcatgtggtcaattttagagtatgtgacacgtggtgatgagaagaatgaatacaatgttggttttagatggacacttctatagatgtctagtaggactatttgatcaagtgttgagtttaggttttaaaatctttgttaattttctgcctaataatctgtctaatagagtctgtggggtgttgtagtctcccactattattttttcagaatctaactctcttcataagtctctaagaaattgctttatacatatacacccatgcattttttagaacacttttctctcttctgcttttttgtttttgagatggagtctcactctgtcgtccaggctggagtgcagtggtgcgttctcggctattttttatgtttttagtagagacaaggtatcaccgcgttagccaggatggtctcgatttcctgacctcttgatccgcctgactcggcctcccaaagtgctgggattacaggcgtaagccaccacgcccggatataagcattctttcaagtgcacacacggtatgcccaaggctgcttcttagatgtctgaatacagtgtctaattaaattcagatgtccaagagtttaagaacatgtccagagacttggctgttgtaggagaaaatataaattagaaataagaagctttattctgttaactgaaaataagggaggatattgtgtttctctcttttcttaaagcatttagattatatgtacatatttttctctgcttttaaaaaatatttgtaaatcttttttgttgttgtttgttttgttttgttttttgaaatggagtcttgctctgtcgcccaggctggggtgcagtggcacaatctcagctcactgcagccaatctctgtctcccaggtttaatcaattctctgcttcagcctcccagtacctgggattacaggcacccgccaccacgcccggctaattgttttgtatttttagtagagacggggtttcaccatcttggccaggttggtcttgaactcctgaccttgtgatccaccagccctggcctcccaaagtgctgggattacaggcgtgagccactgcacctggccaatatttgtaaatcatatttacagctagatcaatcttgtggttttttgttttgttttgttttttactcagaatcgtcttaattgagaaccacagaaccattgctttgtttttgctttggcaaaagtatatacatatatatatatttttttttagtcttttaaagtagacatagatttgtttagattaaagctcattttaagagccacaaaaattgaacacaaagataggattacatttagcactacagagtgatagagattaaaagatgctgagtaaggttctttgacagaaaattgataatccaaggtaattatctaatatttgcaggctgaagtacttacactgcaaaatcaaaaaccgttcagtgtataaactgaacagtggagtctgtagttgtatttggtttcgatttattacttcagaacaattagcatagttatttgtagtgtttgtagacaacttgcattcatataaattatgcagtattttctacaatagtatgaatatgacacaatatttagtaaatttttttttttttgagatggagtctcactctgttgcccaggctggagtgcagtggtgccattttggctcactacaacctctgcctcctcggttcaagcagttttcctgcctcagcctcctgagtagctgggattataggagcacgccaccacgcctgggtaatttttgtatttttagtaggtacggggtttcaccatgttggccaggctggcctcagactcctgcctcccaaagtgctgggatttcagatgtgagccaccatgcctggccacaatatttactttcaatgagtttcctttatttttttttttttttgaagcagagtcttgctctgtctcccaagctggagtgcagtggcacaatcacggctcactgcaacctctgcctcccaggtacaagcgattctcctgcctcagcttccccagtagctgggattacaggcgcgcaccaccatgcccggctagaatttcttaaatagttattttaatattgttattcatactttttaaatataaaatgttttaactgaattatggttacaagtaatttttaataattctacattatgactagtacattaaaattatttatccttagatatttatatctaatatccaaagaaaattcactacaaaattgttgtagtagatatgagtctgacatgcttattagtttatccaatagggataattataggtaagcatgattttaatgtctattatgtcactaaatttgaatgctgctattacaggacaagcaaacatgacaagtgatgtggccatgccaagattgtaatagctcttcagttagctatgctgcaagctcaaatatattccagtgtgtaaacaaagccagattcaaattcttcatctaatgtgctagtggaaattgtcagatgtgtttcaatatagttcccccatctaatggttaggagatgagacagcagcagagatgaaagagaaaccttataaaattttgctgagaatttgtaccccctgctttttttttcgagacagagtcttgctctgttgcccaggctggagggcagtggcacgatctcggctcactgcaacctctgcttcccaggttcaagcgatccttttgcctcagcccccctagtagctgggattacaggcacgcaacaccaggcctggccaatttttgtatttttagtagagacggggttttgccatgttggccgggcaggtcttgaattcctgtcctcaggtgatccgccctcctcagcctcccaaagtgctgggattacaggagtgagccaccacgcctggctcatcccctttttaaataatgttcatgtttctcatgctgagaatagttgtgcactttgggtatttaaagagaaatttttaactttttattttctctcaatataatcttgctcagatagagagctgttttttgctcaaatcctttgggtgtctgtttcaggggtcctattagtatcccatggtgtctgtgaataaggtgggctgtcacagggagaattcttagatctatctctatctggactcatgctggaaatccagcagtatttttttcatgtcaccattataaatagaagctgaggctgaaacactgctcccattcccattatcgtgaaggtgcaatttcacccaggaggcctgcaggctctcctcctgcagctcaggcttcattgtctgatgggacgctggagtgctgctgtggcaactggggttcatgtaagatgtgagctgccagtgacaagctttatgttgtggcctctgcgtcagtggcagatggtaggcgtcaagagaggacatggccatcaggagagggcaagcagggtgctctagcccagtgctaaaggagtaaagagccattgctttaaaatataaatagccaaaaagataacaccctattcaaccatttctgtaggagagtgggagcctaccttcagcaggcacctggcttcaagttgcaaaattacctcctgttatgaagatgtgaaaagtttattttgtcattgaatataaccaattagcatacacggatggccttgccaattaccagcggaatttaggatgaactacgtatgacatggtgctgtaaatttttctacttgtggactaactatggtgactgtctttctgtctttgcaatctgttgagcagattgactgtgatgcgtgtcacattcaggttaaattgtgtaataaaacagttttctttctgttctctcattttggagattttctggggctggagaaaatttttcttttaattatattttccatacactgtctagaattagcagacatgatataaacacatgccaaccaagctttactctagagaggatttttcctctcaggcttccagtcagctcatacatttctacaaacttcacaggatggcaatcaaccatttcacctctttcagtgactcttgtatcttcagacctgaaactaattcagagaccagggggcccagaaacccaatcagagtaacatgtgagtgttgagtagacatgtagatatgagaatctccactttccccttcctcctattgctaaaatacccacaaatatgcaaataacacctgctgaagctccaaattctaaatctaggtcttgagatttggaaaacaaaaaaaaaaacaaaaaacctttcatctgaggaatgcaagttcttttagttgtcaaactcagagagacattaaaatgacaacacagttttgtctttttcccatctttaaattatgtgttttttttttttttttttttgagacagagtcttgctctatgaccaaggccagggtacagtggtgcgatctctgctcactgcaacctccgcctcctgggttcaagtgattctcctgcctcagcttcccaagtagctggaattacaggcacgtgccctggctaatttttgtatttttagtagagacagggtttcaccatgttggccaggctggtcttgaactcctgacctcaagtgatccacctgcctcgacctcccagactgctggaaaattacaggcgtgagccgctgcgcccggccctgaattatgtatttatctcttaaaactgttagctactgccaccaatagctataaattaaactaataatgccacactggacactataaccatactctaaattttaacgatgtatatccaatcaataatcaatgtcatttctgtaaattaatgaaaatttctgataaacaattttatatcagccatctctctgtccttctctttttgccttttcggatcgacttataactgctcctaatcaaagtgtagatgacctgcaacttgaaggtttgctcccaggttacaatcctcaagctttgcctcaataaactgtctacttatattcatgttgccttagctttatttcttttaggtagacatatcatttagaacgtgctaaagcagcctctataaagggatctttcctttgattgtactctgcttgctgtaacacccaagaatgaaaagccaggttgatcccacctagaatctgtaaataaggtctggcgtcttcctggaatttataagataaggccagactttgaattgagaatgtagaaaaaaccaacaagagacattttctgcattgtcagatgtcaacatagacatcttaaagttcccctttgagaatgtgattctttcagcttctcagatcttgtccggtgacatgctacagttatgtaaggggcatcaggtataaatagaatctgatggcagaatatgtaagtgtgaacaagtatcttcagagtgagagatcaagatgataatgtatccagagccataaccaaaactatacctacctataaaatgtgggactggagtagaatattcctgttcttcctcttacctaagagctagataatcaggacaggtgatccagattctcgagcttctccagggcagtttaattttttatttagaattagcctgagtcggccgagcgcagtggctcacacctgtaatcccagctctttgggaggtcaaggtgggcagatcacctaaggtcaggagaccagcctggacaacatggtgaaaccctgtccctactaaaaatacaaaaattagccagacgtgttggcatgtgtctgtaatcccagctactcaggaggctgaggcaggagaatcgcttgaacttgggaggtggaggttgcagtgagccgagattgtgtcactgcactctagcctgggagacagagcgagactccgtctcaaagaaaaaaaaaaaaaaagaattagctaattagcttgagtctctcctgcctggcttatcattgggccatcagcccagggtcactgggaactctcacaatcagctgggtgtctttgagacatttgagcacgtccggagcagaattgtgccaggttaacaaaagtggttaattctgcttgtctcagtgtaaaaattgagtcatcctgtgtttgctccttccctcacacaagagatgactttggtgggtacccagatgagagtttctccagttttctggtacttgggtgaaaaacaaccaggatgtctggagactcaaacgaataaactaattgcttttatttcatatggccattagaaaaatagatgaagcagtcatagttcctaccatccaggaacttttagtctagactagcacctgaataaagggttgaagtaagcatcgtatggttgatacaatgaacagatgtgtgcaaaaaaccttgggctttatctgggcccctttctttatcttgtagtgacttcttatgtcatcaactaaagggatatttatgaaaagaagagttgttattattacatgcatttctattacctaagaatatatatttatcttctaataattaccctagaaagccttacgatatttatttaaattgcttattagtatgcattatataatcgacagggcagtggctaaaaaaaaattatataaactctgagatataagtttctcttaggcaagcttagggaaacacaactggaaataccccagtggcacagagaacagaattctacataaggtccactccctgcccagttctgttcagattcactctatttgagggtcttatttagatctggccccactctggagtcttgcctcacagaactgattggaagagatcagagttttggctggtgaatcctgctgcctttctaaagctggtactcacaattttctgcaccccgaaggagataaatgggaaaaataaagtatatattttaaggtcttcatttttaaattttctattaaatcagtgcttgcagagacattccatttagcaacttgttttctattcctgcagattcagtagttgctccacaagtcacaaaaaagcaaatataaaccacaataaaagtttctctaaactgcattaaacttttctgtattccagtcatctgtctacatttagcttttattgtatacattttctttaaaaaaccaagaacagaaacagaagatgaaatacatatgctgggcccttaacctaatgctgggaattatcaaacacttagtaccaactcccagtgtgttatgaggattaaatcacataatgcattatttctagcgcagtgctctgcaacatactcttgcttacctagtacctgcttagtaaacattgcattagtccatgtgtacatgttgttttccaaatgcaggcttattcaggcactgctaccttttgttgcctctgtaaactttaaagagccagcgaagaatttgatgctttaggatggagattagttgtcttcatttgtgccagaagtatttgtgttgtgacaacagtgccaagtataagggactctgtgctgtgcctgctttctctaactaatgctaataatgagcctgggggagcatcatccgcattgacaggggacttatttaaaacacacattcatgtactctttgaaaacctgaagaatcacattacacagaaagagattaaaattaccgagtggtttataaactcattaaagcttgagagacaatgcttagctaagtggttataaacccagggttctattagtttggtgcaaaagttattacagtttctgccattgtaattaatgtggattacttagatgtggatactcagattacatggccaattcacagaaatatctttgctcgtgccctttccacgggttctttttattgttggacacatccatgttgttttaattaagagcctcatgtgattctaaggtgaggccagaatcacgtatgaggggttgaagatacactcatgagagttcagtttcacctctttactacagggtgatcatagggcctgttctgtttggttttggtatggacagggcagtgtggcccatattttcattactgtagcagagattgttggtatctgtgccagggaagggcacctaagacaggaaaggagaaacacatatttctataatcatggagcaactaattgttcctgaatttttcatgttataaaggacagaaatgggtggactttttcagcgggtcttggtacttctgcctgtgggtgtggtggtagcaggtaaacaggtggtgctgacacctttaaaggcatattctcaagatgcaggtctaatttgtccagagaatctcaactgaaaaggaatcccagggaaggaggagatacggaaaaaatatgcctttttttaagctaaacacgtctcagatcaagagctgtgtccattctgcctcctgaaattccatgcgtttagtacttgcaaacctttacttctcttcttgtgtttttcctccctaatgagtttaactactttttaaaaattttattgatagtcaagggtctctgaaaaatatttcttatttatttatttattatttttatttatttatttatttttttagaaggagtctcgctctgacacccaggctggagtgcagtggcgcgatctcggctcaccgcaagctccgcctcccgggttcacgccattctctgcctcaacctcccgagtagctgggactacaagcgcctgccaccacgaccggctaatttttgtatttttagtagagataaggtttcactgtgctagccaggatggtctcgatctcctgacctcgtgatccgcccgtctcggcctcccaaagtgtagggattaccgtcgtgagccaccacgaccggcccctgagagaaggcattcttgtcttgtgccagttttcaaaaagaaatggtttcaacttgcatctatttggtatattggctgtgggtttttcatagataactcattattttgaagaatgtaccttcaatgcctagtctattgagggtgataacataaaggatgttaaactttattgaaagatttttctgcatctattgagataatcttgtgggttttgtctttatttctgtttatgcgatgaatcacttttattgatttgaagcaaccctgcatccagggataaagcttacttgatcatagtcgactgacttttattttatttatttattttttgagatggagtctcattttctcgcctaggctggagtgcagtggcgtgatatcagctcaccgcaacctccgcctcccgggttcaagcgattctcctgcctcagccttccaagtagctgggattacaggtgcctgtcaccatgcccgcctaatttttgtatttttagtagaaacgaggtttcaccattttggccaggctggtctcgaactcctgacctcaggtgatccacccacctcggcttcccaaagtgctgggattacaggcgtgagccaccacacccaacccatagtcgattaactttttgatgtgcttctggatttggtttgtcagtattttgttgggaattttttatcaatgtttattaagaatattggcctgaggttttctttgttttgttttgtctctgctaggttttggtatcagaatgatgctgttcttatataacgagttggggaggagttccttctcaattatttggaatagttttagtaggaataatagcagttctttgtacatctggtagaattcagctgtaagtctgtctggtcctgggctttttttggttggtaggctgtttattactaattaaattttggagctttttattgttctattaagggattcagtttttgttgttgttgttgttcaatcttgggaagatgtatttgtccaggaattcattcatttcttctagattttctagtttgtgtgcgtagaaatgttcactgtagactttaattattatttgtatttttgttgggtattgtctgttttatcatttctaattgtttcttcattaatctagctagtggcttatttattcttcattaatctagctagtggcttatttattcttcattaatctagctagtggtttatattattaattttttcaaaaaatttactcttcgatttctccatctttcttgtagttttttatgtttaaatcttcttcagttcagatgtgatttttgttatatcttgtcttctgctagcttaagggttgatttgttcttgcttctctcattcttctatttatgacatcgggttgttaaatggagatttttctaactttttgatgtgagcacttagtttatagcactgccttagttgtgttgcagtgattctgctgtgttgtatttttgttctcacgtatttcaaagaacttctcaatttcattttagtcattcaagtgtaggttgtttaattttttatgtgtctggtttcaagtgcttttatttgtattgaattatatttttatcaagctgcagtctgagtgtgttgctgatatgatttggggatttttgaatttgctgaggattgctttagttttaaatgtgtggtcagttttaaagtatgtgctctgtggtaatgagaacgatgtatattatgttgtctttagatggagagttctgtaggtgtctgttaggacaatttggtcaagtgttgagttcaggtcctaatatctttgtggtttttttttcctcagtaatccatttattagtgtctgtggggtgttgtagtttcctcctattattgtgtcagagtctgtcttcataagtcactaagaacttgctttatttatttgcacccataaatttatataacacatttttctcttctgcttttttccccataaacacagtgtgcccaaggctattccacagatgtctgaattcattgtctactgaaattccgacgtcttgacagttcaacatgttccaggacatggctgttgtaggaaaaaatatgaattagaaataagaggatttattcacataccttaaaataaaggagaatattttgctcttctctcttttcttatagcatttatattatatgtagacaattttctctgttttttttgaaatatatggaagtcatattaacagctaaataaaccttttggcattcttttttactcgggattgtctttatctaggaccttagattcattgcttgtttttgctttggcaaaagtttatattttttgttattagccttctaaggtagacacagatttgtttagataaatgtcattttaagtgcacacaaaagtttggcaccaagataggattaaatttagcaatacagaatgattaaagccaagagatactgagtaagttcctttgacagaaaactgattatctgaggtaatgatctaatatttgcaggttgaagtacttacactgcaaaagcaagtgtagttcagtgtataaactgtggagtctgtagttgtactttgctttctattttatacttcagaataattagcatagttatgtgtactgttagtaaacaacctgcatttatataaattaaacggtattttctacaatagtattcatacaatagtaggaatataagggcaaaatatttactttgaataattgttttaaataatcattttaatattgttaatcatactgttgaaatgaagttttttaactgaattatggctacagatacttttaaaatattttacatacattatgactattacattaatttatacttatttatatctaatatccaaaaaattgctaccaaattgttacagtaaatatttgtctaacatgcttattaattgatcccatatgggtagttacagataagcataattttagtgtctttcatttcactaaattggaatgctgctattacgggacaaataaacaccagtgaagtggtcactgagaaaccataataactgttaatttagctgggttgcaaggtcaaatgtatttcactatataaacaaagtcagatttcaatttttcacctacaagggcttatgaaaattgtcagatgtattccattgtagatctcccattcattggctaggagataagagagcagcagagataaaagagaaaccttataaaattctgctgagaatattttttcctttttcataatgctcatgtttctcatgctgagagtacctgtgcactttgggtttttttgttggtttgttttttgagacagagtctcgctctgtcacccaggctggagtgcagtggcgtgatcttggctcactgcaacctcctcctcccaggctcaactgattctcctgcctcagcctcctgagtggctgggatcacaggcacacgccaccaagtccagctgatttttgtacttttagtagagatggggtttcaccatgttggccagattggtcttgaactcccggccacaagtgatccgcctgcctcggcctcccaaagtgctgggattacaggcatgagccaccacacccagcagcactttggggttttagagagaaattcctttaaggagaatattttctggctgatttgatcaagtttatgtctaatcaaagtgttgttcttaagatgcctttaactttttttttctccatataatcttgctcagactgagagctgtttttctctccagtgctttgtatggctgtttcagggatcctgttagtatcccatggtgtctgtgaataaggtgagctgtcacagtgagaattcttagacctatttctatctggactcatgctggaaatccagcagtatttttttcatgtcaccattataaatagaaactgaggctgaaacactgctttcatttccattatcatgaaggtgcagttctacccaggaggcctgcaggctctcctcctgctactcaggcttcattgtctgatgggacgctggagtgctgctgtggcaactggggttcatgtaagatgtgagctgccagctgtatgccctgtgctgtatgtaggctgtacctcagtggcagatggtagggttcaagagaggacactagccatcaggagagggcaagcaggattgctataacccagtgctcagggagtagagagccattgctttaaaatgtaaatagccaaaaagatagcaccctaatcaaccgtttgtgtagcagagtgagccgactttcagcaggcatctggcttcaagttgcaaaactacctcatatcatgaagatgggaaaagtttattttatcactaaatataaccaattagcatacatgaatggcctctccagttaccaggtgagttcaggatgaactatgtatgacatggtgctatatattcttctacttgtggactaattatggtgaccactaattatggtgacagactaattctgtctttgcaatctgttaagcagattgactgtgatgcatgacacattctcgattaattgtgtaataaaacatcattcttactgttctgtcattgtggtgtttctctggggatgcagaaaatttttcttttaattatattttccaaacactgtcaagaattatcagacacaataaaaacatataaggtgccaaccagaatttactatagagaggactttccctctcaggcttccagtcaactaacaaatttgctgcaaagtgcctgctttctcttaaatatgcaggcagaattatgtctctgcctgttagatacctgtagttttctatagtcacttctagagagactagaccagatttctacagacttgacagggcaacaatcaaccattttacctctttctatgactcttgtatcttcagtcctgaaactgactcacagaccctggaccccaggtacccaatcagagtaacgtgtgcactgagtagacatgtggaaatgagagtctccacgttcccctttctcctcttgctaaaatgcccacaaatgtgcaggtaccacctgctgctactctatccatccagagcctaaatctgcagctccaaattctgaatctaggtcttgagatttggaaaataaaaaaaaacttttctctgaggaatgcaagtctttttagttgtcaaactcagagagagattaaaatgagagcacatttatgtccttctcccctttttgaataatgtacttatctcttgaaagcatttgctattgccaccagtagctataacctaaactaataatgccactctggacactataattcatactgtaaaccttaatgatgtacatcgaatcaataatcaatgttatttctgtaaataaataaaaatttctgataaatttgtaccagccccatctctgtccatctttttttggctttacaaatccacttgtaactgttgctaaacaaagtttagatttcaggcaacttgaatctttgctcccaggttataatcctcaagcttggcccaaataaactgtctacatatattcatgttacctcagcttatttcttttaggtaggcatattatttagaatgtactagagcagcctctatgaggggatttctcttttgactgtactccacttgctgtcacacccgagaatgcaaagccaggctgatctgacatagaatctgcatgtaagatctgacctctgcctgggattcacaaagcaaggtcaggctttggatttagaatgtacagaaaacaaacaggaaacattttctgcatggtgagatgtcaacatagatgtcttgaagttcccatttgagaatgtggctctttgagtttttcaggtcttgtctagtgacctgctgcagttatgtgaggggctccaggtgtaaatagaatctgatggcagaatctataagcgtaaacaagcatcttcagagtaagagattaaggccacaaagtatccagagcctccaccaaactacacctatgtgttaaatgtgatactggagtagagtattcttgtcctttgtttgtttgtttgtttttaacccaaaagctagctaatcaggatgggtgattaaagttctggagcttcaccagggcagttcaatttttcatttagcctgagtgtctcttcccggacttatcaatgggccatcagctcagaagcactgggaacctctcacaatcaccaggacatctactagaaatttgaaaatgtccaaaacagaattgtgtcgagctgacaaaagtgtataattctgcttttgttcagtttaagtaaaatagtttactctgtgttttcctcccctcatacatgagatatctttggttggtacccagatgagagtttctccagtttcctggtacttgagtgaaaaacaaggaagatgtctggagactcaaacagatcaactaatagtttccatttcatatgaccattagaaaaatagctgaagtagttatggcccctaccatccaggaaattttagtctaggccatcaactagagaaaatggctaatttgagcatcatatggtgggtacaatgaatagatgtgtgcaacaaaacttgggctttatttgggtcactttctttatattgttgcgacttctgatgttatcacctaaagggatatttatggagagaagacttattatttctgttctttttaccttgctaggaatacatatttatcttcaaataaaattatcctagaaaactttaagagatttgtttaaattgcctgttagtatgtgttataaaattaacagggcagtggctaaaaaagattaaagttacacaaactctgggatttaagtttctcttaggtaagtttacaaaaacagaactcaaaatacccactgtcatagagaacagaattctgcttaggaacctctccctgtcccagttctgtttagattcaccctctatgaaggccttactaaggtctggcccaaccctggagttttgcctcacagaactgataagaagagatgagagttttgaatccttttgcctctctagagctgatgctcaaaattttttaaaaatccaaaagcagatgaatgggataaataatgtattttaggttcttaatttattattattattattattattgagatggaatttcactcttgtcacccaggctggagtgcagtggcgtgatcttggctcactgcaacctccacctccagagttcaagcgattcttgtgcctcagcctccaaagtagctgggattacaggcacccgccaccatgcctgactaatttttcatatttttagtagaggtggggtttcatcatgttgcccaggctggtgtccaactcctgacctcaggtgatccacccacctcagcctcccaaactgcagggattacaggtgtgagccaatgtgcctggccttttttaatttttttaaacagtgctagcagagacagtccaagtactacttgttctctatttctgcagatccagtagttgttccacaagtcacaaaaaaagtaaatataaacacaatacaaattctgctaaactatacaaactctttctatatccctttcacctgtctatatttaagttttattctatacatttaaaaaaagtcaatgacagataatcagaagaagacataaaaatgctagcccccccctctctaaaatctgggaattattaaagacagtaccagggaattattaaagacagtaccagctcccagggtgttatgaggattaaatcacaaagtacgttatacccagcacagtgctctgtaacatactcttgagcacatagtacctgcttaataaacattgcattagtacatgtgcacatgttggtttccaaatgtaaatttattcaaacgttgctgacttctgtttgttctgtaaactttaaagaaccagcaaagaataaggaaattggttgtcttcatttgtcctagaagtatgtgtgttgtgacgagggtgttcagtgtaagggactctttgctgtgcctgctttctctaattactgctaatgatgagcccaggggaagcaacatcagcattaacagggaacttgtgtaaaatacccacttacagacactttccaagcctgcaggattatatcacacagagtggggccaaagttaccacgtgattttaaagcttattaaagcttgaggggcaatgcttagctaaatggttatcagcccatgtttctagttaggattacatggttaatttgccaaaatctctttacttatgccttttttattttacaggttctatttattattctgagtagaagcatccatgttgtttaaattaagtgcctcatgtgacccttaggtgaggccagaatcaagtatgagaggttcgagatacatttatgaaagttaagttccacctttgaactaaagggtggtcacagggcctgttctgtttggatttggtagtgacaggaaagtgtagctcatattttcattactgtagcagaaattgatggagtctgttaaaagggaggtcacctgaggacaggaaagaagaagcttttacttttatttccatggagcagctcatcattcctgagtctttattttaatataaaaaacagaaatgggtggactttttttgcagctctgggtccttctgcttgtgggcgtggtggtagtaggtgaacatgtggtgctgacacctttaaaggcatattctccagatccaggtgtaatttgtccggagaatctcatctgaagtgaatttccagagaaggagtagaaagaggaaaaaatgactttttttcagctaaacatgcctcagataaagagctgtgtccactctgcctcctggaatgccgtgctttcagtacttgcaaaccttaatctctctacttgtgttttttctccctaataagtttgttttaagtatgttttaaattttttatggtagtcaaagttctctgaaaaatatttctttcctatataccagagctttctctacattctctacatcatggcttcttatatgccatgcaaaattctcaccaggaatttatggtctgcaatattaaaaatgttccccttgtggtgttgaacatgggaagtcacggatactgaagattcctattgggaaaagctggggtccttagtaaagatgaagaacatctaatgttgagattccatctgagctcccccttagctctatgcagaacactgtttagaaaatgctgatttaaacaagatggtatttattacacaaaaacttctaaaaaatttattaggagatacttgctattagagtgttaaagacagactatttaaaatcactactaaaaatgacaaattttcgaggtaacttctaactcaacatatcttttacatctgaaacatatacataactgattctctatgatgcaagtagaacactgaaaagtgtacacatttgtgtttatactttatcatccagaaaagtattatagatacactggtgttgtggatcttatgccattctcttttctcaggattagagatattaggaaatatttctgtgtaaataaatattttattggataatttcagtcactcctgtaagtcagaaccagttctttttactctctcattttgcctttagtcaagttataaattttgctggctacctggtgtgtgtgtgtgtgtgtgtgtgtgtgtgtgtgtgtgtgtgtgtgtgtgtgtgtgtatgtgtctatgtgtgagtgtttgtgtttttcagggactgttgacatttacagatgtggccatagaattctctctgatggagtggcaattcttggacactgcacagtggaatttatataggaacgtgatgttagagaactacaggaatctggtcttcccaggtgatgacaacttcaacacacaattccaaatataccctaatggtttcatttctcttttttgtagaatgtgttttggtaatttatgctttgcataaatgagtttcagatctgtgttttcaagaaaatcttggggatttgtccatgtataaaataactttttcaggatgtttcatcttgacctgaaatttccacattcctgagctgatctgtgtcctttactctagattagcagtaatttcattaatttagtgacataaaatattgttgtccataacttaaaatctaattgccaacaccaagttttgactcagtattactggatagtgaaattaataacctacaaatttaaaatatttaataaaattccctgttagaaatcagtattttgtgattactttatgaaaatattttattacaccctcttttctgaacacagaagtaggttggtaactggagaatatgagcaaaatttacattattcatttgtaatgaaataggtattgctgtctctaagccagacctgatcatctgtctggagcaaaaaaaagagccctgaaatatgaagagacatgagatggtggatgaacacccaggtaggtgagagtgaaggtgaatacaatgtttaacacaaatgagaggtctaaaaattaaggagaaagccagttgttaaaatatgagttggaaagctgtgttttataggaaatagtttctgggaagcctaagggttttttgtttgtttgttttgttttgttttatctcaaatttggacatcttctgttttatgcttttaaattttctaaggattctgctttctttttagtgatcttctttcaagttttcagtgcgagccactaccctgttcatggcatataaaaaactgcacagtctgactacttttacattctttttgggaacacacaaatctgcataattttaagaaactctgtgttaaacaattttttaagttttctttttgtatcatgtgtaaaatgtgaattgtagtttctgttccttttttttggttcatttttctgcacatttcatcttgtttatattactatagtcttcaaatatagtttgaagttaaaaagtatgatgccctgtgctttgtttttatttttaagattgctttgactattcaaagtttattgcagtttcatggaaattctaaaattgtattttccattacttaaaaaattgccactgaaattttgatagagagtttatcgaatctatagatcactttggataacacggcactttaacagtatttattttttaaatgcatagacatgaaatatttttaaatttatttatgtcttttctaatttctattactgatgtatcattataaagactttttacctcctttgttaaatttgttctcagaaatttatcattttaatgctattgtaaataagattgttttcttcctgtattttatcagagagcttgtcttaagtgtatggaaccctaacttgtaagttaattttatattttcctaatttattgattgtatttagtagtttagacaggttttaatgtactgtttatgattttatatacataggatcatatgatctacaaccagcaactttttacttgttttccatttgaatggctcttttttatttttcgactaattcttctgccacatactttcaatgctatgttaaaataaaagcattgacaatgggcacaatatagttttgcgttggtgtatgtgaatttgaaggagcaaagacctcttcaagttttttaaactgctttcaggaggtaaagatcatcttttgttgggcccccagggtgatgggatgccctctgggtttgtagtaaagaggggttgcagcttggtcaccaggctgctggatctgcactagggtccacctttagctggcttgttacaaggggatttggtagttgtaattcccattttatattttggatagattgaatttcttttggtactttgctctgtagggcagacactagtgcaggtttctgcagtccagtctgcataaggtgggccttatgtcaaaatgtggatgagtacagctttcactgagtaccagaaagaatttttccaggtcattgtgtgggttcctaggtaggcagaactggccattaactgtggctcatggagctgaaactgagtcattgaactgcttcaagaaccatggtaaaggccaaggtctgcaggcctgcctgcgtggctataaatgaatgtcttcctccaggcctctggaagggcaggacctctctcagattgtggctggaaggagtttgagatggttacaccgtaagttcagaattttctgttgtgccaagctaggtaggccacttcctagtctgtagttaagaacttcctagtctgtagtttaccacctaaataagggcctgccttctgaaaagaagacttttcaatcttgggctttatcagatcttcacaactccctctctggatctcaaagctctcttaaaggcacttatatttgagatggggtcttgctacacaatccaggctggtcttgaaatcctggcctgaagcaattctctaacctgaatgtaccatgtagctgtcattacaggtttgagccatgagggcctggctctctcatgtaggtatttttgtgagagatggctgacaaattatcttgctgtgcagggagtaagaaaatagggtacccttccttcttccatcttactgatttcactctctttatacatttttattctttattttctattacaaatttgtaattttagattcagagatttagaacaatattctagaatttacatgttatgcctgaagtaaattagataattagtagacactccatatttactaaaacagttacttataaatttaagcttgctgtaggcaaaaaggaattataggatttgcacccactttttcagcctatatctaaataatcacataattttctcccatatatttgttttaggctctaaccatattctgcttacatttagcaatgtaaggctattctttgcttctaaagttgggtcacagcagttttattttgtgtaagaatagcatatatttaaaacataaaaattatttctagttttaaaaaaatgtttaaagtttctcatgagaatcttttatttatgactatactgcaatttctctgaaattttacagccatatagtgtatgtcaatgatttaaaatacctgccttccatgagtacacagttagtcaaatactgtagttatctagacaaatcctttcttcatagtacatcaatattgcaaaccagaatttatgaataaacatttctcttattattgttttccagtctatattggtgttttataatgttggtttcttaacatcagtttattgtgggttttgattttacttaggtactataatattagacaatttgcaattctatttgtacactttaagtcaatgtggggtttaattataaatcagccatatgtctatcacaatcagattatatacatgtgtgtgtatctataaatataaccctaatttttgttatggcttatcttgtatacattctctcttagctgaatggttgttttttcttgtccaagtgaaaagtcaaggaaatagtcttattttcaccatgtgtttaatgatgaatatatatgtcctttgtgtgagagaggcacttttgtgatttgaaggtaatttttgaaaaaaattataattctgtattttttcagtttttctttgaaaaacattgttgtaaaaacataaaatttaccatcttaaatctattaaagtgtacatttcagggctaggcatggtggtggctcacatttgtcatcccaggattttgggaggtgaagacagaagaatcgcttgagcccaaaagtttgagagcagcctgggaaacatatggagattctctctctacaaaaaaattataaaaatagccaggcatggtggtatgcacctgtagtctcagctctttaggagattgatggtggaggattacttgagcctgggagcttgaggctacagtgcgcctcaagcttgggtgacagtgagaccctgtctcgaaaaaagaagctgtacatttcagtattgtttagtatattcatattatataaaagagttccgtaaatttttcattttgagaaactaaaactcaatactcattaagtaacaactgcccattttaccctctccccagcccttgagactcatagaaacaaaacacccttccatgttttgtttctatgagtgtgactaattaagatatctcatataagtgaaatcatatagtatccatcattttgttactggcttatttcaggtaacatagtattatcatagtttatcttaaaatatgacaggatttacttaaggctgagtaatattctactgtgtgtgtatgtgtgtgtgtgttcgtgtgtgtgtgtgtataacatggtttttgatgtgtttataagtcaaggaatatctaagttgcttcagccttttagcttttgtgagcactggcacaaaaaacacagatgttcaaacttgtctttcaggtcctgtgttgcatattttggatataaattcataaatgagattgctgtatttgatgatacttttattttaataacttgaggaacatttatacattttgaaataatgactacatccttgttttccacccacaatcaacatgactgtcatttttattgaatcatcaacagatttggtatttctaaaaaattgatatctgtcattctattaagtataaggtgatcttgtttttcaatgtaatttttattcatttctttacaaatggtaattctgcatgttttttcaaagcgttttcccatttgtgtatttttttgataaaaatttagttcaattatttctaaatcaagttattcaacttcattgttcagttttaagagttgcttatatacttttaatattaattcctatcatatgtgatttgcaaatactttcacccactttctgaaaggcattgttactctattgaatgttttcattgacatgcagaaattttggagtatagtgtagttaaatttttctttttttctttgttgctcatccatttaatgtcgtatctaagagaatggtgccaagaccaatgtcatgtcttctccctatatttttttctaagagatttgttagttttttaatgtctaagtattttatttaaaatacttttcatatttggttcaaggaaatgatctaactttattttatcggtgttgatatctagttttcaacattatgttttgaagagattagcttctctctattgtgtgctcatggcaactttgtggaaaatcatttgattatacgtggaagggtttatttctgggctctctattgtctttcacctgtttatctatgtgttagtaccatattgtttgtcttatttagcttttaatacgttttgaaatcaggaaatataatgcttccttgttttttaatgggtgtttggctatagtttatcattaaattaaaaaattttaaacaatatgtttgtaaaaaattgtgctattcagatttttatagagattataataaatctgttcaccactctaggttgtatcgacatctttgaaggattaaatatttttaccctcaagccaagaatatgctaaagagtgtgttttattttcatatatatttggatttgccagttttacttttgctcttaatttcttgtgttattcagttctggtcagagaacacatatgattttggtcttcttaaatttatgtcttgttgtttgaggcaggatcttactctgtcactcaggccgtagtgcagtggaataattttggctcactgcagccataacctcccaggctcaagtgatcatttcagctcaatctcccaagtagctgacactatagcaatgcattaccctgcctcactaattttgtgattatttgtaaggacagggtttcactgtgttgcccaggctggtctcaaatttctggctccacatgtttctcccatctcagttttccaaaatgttgagattataggcatcagccactgcacccagctggtattctcaaatttaataagacttggtatgtgtcctaacagaatataccaggcacaaataagaatattgtgtattctcttgcttttgattaaaaaggtttgtatatgcctgttaagcctgattggtctgcaatattgtttggatttccatgttctccaaatcttatgctgcaatgtaatcctcagtgtttaatgtggaacaggtgggaggtgtttgtgtcatgggggcaaattcctcatgaatggcttggcactagcttgttaatcaaagtgtttacactctgttaattcaaagattggttcattaaaagaacctggcttcattatctcacacttgctctttgtcttaccatctaatacgtcctgttactctttgcctttcacctaattgtaagcttctgagattctcaccagaagcagatgctgacacacactttttctacagtctgccaaactgtgagccaaaaaaacctctttgcttgatgaattatccactctcaggtattcctctctgcaaaacaattgaatttggcaatttgcttctagaggcattatgttatattggggagcagaaaaaccgtgttgggtaaatataacagacttttctttttcttctgtgaggttctttatattgtgctcacctgggacactgtccacacttaactcatttataaattttccacaaaagtattttggtcagtatgattttgttaactttatatgtctaggaagaaattatggtctgtggtattgtgctatgtcatcttgcttatgtagtttgtgtaattttatagattagacttagaaagtatattagagtctagcaattaaagtaatgtgttatttttatttctttcagtaatgtgttctcatttcacccaagactttttgccagagaagaacatagaagagtctttgcacaaagtaacactgagaagatatgaaaaatgtggacattaagaaatttctgttaaaagaaggctataaaagtgtggatgagtgtaaggtgcacaaagaaggttataatgaacttaaccaatgtttcccaactacccagagcaaaatatttcaatgtgataaatatgtgaaagtctttcataaattttcacatttaaaagcatataagataagacatgctgataagaaacctttcaaatgtaaagaatgtggcaaatcattttgcatgctgttacacctaattcaacataaaagaattcatgctacagtgaagttttacaaatgtaaagaatgtggaaaagtctataacagatcctcaacctttactacacataagagaattcatactggagagaaaccttacaaatgtgaagaatgtggcaaagcttttaaccagtctacaaaccttactagacataagagaattcatactgcagagaaaccctacaaatgtgaagaatgtggcaaagcttttaaccatccctaaaaccttactgaacataagaaaattcatacttgagagaaaccgtacaaatgtgaagaatgtggcaaagcttttaaccagtcctcaatactttctaaacataagaaaactcatactggagagaaaccctacaaatataaagaatgtggcaaagcttttaatcggtcctcaaatcttactacacataagataattcatactggtgagaaaccctacaaatgtgaagaatgtggcaaagcttttcaccaatcctcaaaacttgctaaacataagaaaattcatactggagagaaaccctacaaatgtgaagactgttgcagagcttttacagactctgcaacccttactagacataagagaattcatactggagaaaaaccatacaaatatgaagactgtggcaaagcttttacatattctacaacccttactagacataagataattcatactggagaaaaaccatataaatataaagactgtggcaaagctttcaacgaatcctcaatgcttactacacacaagaaaattcacactggagagaaaccatacaaatgtgaacaatgtggcaaagcttttacagactctgcaacccttactagacgtaagagaattcatactggagaaaaaccatacaaatatgaagactgtggcaaagcttttacagactctgcaatccttagtagacgtaagagaattcatactggagaaaaaccatacagatgtgaagagtgtggcaaagctttcacagactctgcaacccttcctaaacataagagaattcatactggagaaaaaaaccatacaaatgtgaagactgtggcaaagcttttaacgaatcctcaacacttactgcacataagagaattcatactggagagacaccttacaaatgtgaagaatgtggcaaagcttttaaccattcctcacaccttactacacataagagaattcatactggagagaaaccatacaaatgtgaagaatatggcaaagcttttagccaatcttcatcacttactaaacataagataatttatactggggagcaaccttacaaatgtgaagaatgtgacaaagcttttaacctatctgcaagccttattaagaataagaaaattcataccagggagaaactctacaaaaccagaaagtgacaatgattttgacaacacctcaaaccttttctaaatataaaagaaattgtactggtgacaaatcctagaaatgtgaagaatgtgacaaaacctttaaaagattgtcccacttatttttaagtaagataatttttactggagaaaacacctacaagagtgaacaatattgtgaaatttctaattaatagtcgcaagttattgcacaggaaagcatttatacttgagaaaaattgtataaatacaaataatgtgaaataaccattaatatctgctcacatcttactcaacgttagagagttggtaaataataaaagcattataaatgcaattactgtaaaaaaatgtcagcctttaaagtgaagaaaaggctgggcacagtggctcatgcctgtaatcccagcactttgggagtgctcaggtgggtagatcatggggtcagtagtttgagaccaacatggccatagaaaccccatctctactaaaaatacaaaaatttagccaggcatgttggtacacacctgtaatcctagctactaaagaggctgaggcaggagaattccttgaacctgggaggtggagattgcagtgagccgagatcataccactgcactccagcttgggtgacagagcaagactccatctcataaaaaaaagtgaggaagagtattcattctgaagacaaagattacgaacataaagagggttgtagtacccttacttgtatcacagattttattgcacacattttgtactacaaaaaaaccctgaagcaatttctcaaacttggctcaacatcaggaaatttatgttgggaaaaaaatcttgcaaatggcaataaatttggagaaaaattgtttcaataactatttcttagaaaacaccagaggtttcatactaaaatatatttttgcagatgcagtacataggaaacaatgtttaatccaaaatgaaatcaatgtaaatatcagaaaattcacagtagaaatacctaaggcactgaagctgtagacattacactaaatcagagtgctaagtatagaaaataatctagaactaagttggtaaataaattatttgtacatcactttaaaagaaatagaattttttaaatgttataattacaagtatactttggtccttaaaattagatattttaaacaagaataatgatgcaattctactctcaaattacttcatgctctattttccttcctactgtattcacctgtgaaagcatgttactaattgctgcatcaaaaatataagaggtttttttttattaggtgggcattatttatgaccttttctatggaagagaaaaggcattataatgtaagacgtgatgaaattgtaagtggagagactctttttagttaacacgtagtattaagtaatgcatgagttagatgttcagagtaatattctacattatggtgataacatttttaattttagttaattaaaatttattagtagtatatcattttactaatagtacttttatgtaatagaatatagtacattattaaatttttagattaagtgtgaacttattttttttttgagacagagtttccctcttgttgcccaggctggagtacagtggcacgatcttagctcactgtaacctatgcctcccgggttcaagtaattctcctgcctcagcctcctgagtagctgggattacaggtgcccgccaccatgctcggctaatttttttgtatttttagtagaggcagggtttccccatgttggtcaggccggtctcgaactcctcacctcaggtgatctacctgcctcagcctcccaaagtgctgggattacaggcataagccaccgcgtccggccatgtgaacttaaatttttaaagtttgttaaaaccattgtgcattcaataaagtgttattatgccactaactttaatctattcaaccttactcaaggatgtaggtaaaagatggtaacaatatactatttggtaacataatggactaacatttctagtaatctcttttgccagtgactttaaagtgcgaagaagttaaagaatattgtttccataggttaaatatttactcgttttttcttattttagcttatttgtcttaatttttgtgagtacatagtatgtgtaggtatttatgctatatatagcctatttggatacaggaataaaataggtaataatcacatcagggtaaattaagtatccatcatctccagtatttatcctttgtattagaaacgaattctacatttttcgatattttaaaatgtacaattaaattgttattcactacaaggtcatgtttatgatcataataaaagttatatacaattataaataaaatccatacatttctgagtccaaaataaacattaaaaattgttacatatctttctttgaatatatgacatctctgcctgcaaacacatacagacttttagttttgatttacatagagttaaatatacacatacattactctaaagataaaacctaattttcttaggtttaagaaaattatggagtaagtaagcatgtttgaatgagtttgtacctattttcagaagaaaaaagcaatattggaagaaaatgaatcattttaataaggtgactagaagactaaaaacctcaaaaatgctaaaagcaaattgataccctctgctttttattgaattgattactgtaaaatcttacagctaatggatcagaatctccttatgcaaattttttgtctttatttgtctggtactcatgctagacccataattttcttgtttctcataatttttcccttttatagcttatgagattttcattatgtgagctggtcgaggattgtatgaatgatttttatacaacttagtagtgcacagaaaataatttctagatgtaattccacaattcgtttattaagttatattttattgagttagaacattccatttagttcttttaactggagaaccctatagaagcctactttttttaagttattgttcctttcactttttataattgacagaagtaaaattgacctattgatccagccagtttgttcaggtaagtactagggaagtttcataagtcatgaggatgtttatatatataaatatagcaaacaaacatggcagtgtaactgatgctccatagaaaggcagaaatattcccgtgaaagttagtttcaacttcatgtaagagatagaaaatattaatggtgaacaaataactaattcttcatgtgaagagtcatttttttttcaggctgcaaagctggatcttgctgaatttaaagaggaattttgcttcttttatattcgaattatctttagttttctttgtctaattctgtgtttttcaactgtgtgtgcatcacagcccttctttgtctttttctgttttatggctacaattttctcataatcattttcatgccatgtcatttaggatggtaatttgttggttttgataagaaagttggtatttttaatgcactttaaaaaatggttttaactggagagtttgcttatgcatatagctttcaaatgagttaattaagataaaaggcacacactgttcacaggtaagagaattaaatcagttagcatcatttttctctgtacacagaaaatctcattaaattcttacaaagtttggcaagtataaaatgtgctaaaatatatatcttagaatttaaatttttaagagctaataagtgaattgtaaatttaattttctatgatatagaacaatgtacatttccatgcagaatcttctatttttaagtgtaatgttaaacatttcaaagtaataaagtgacctctgtagatttaaaatttggaataatattttttgcatattgatattacaatttggggaatttctcactcttatatcagtttttttggtgggtgaagtttacagtttttattcttaatcacctaatggtagacaactttttggtcattttctctggaaaacatttggagatcatgtcagattttggattaaagctttttttaattatttcgtatgcaaacttgtttactgtgttctgagtggccagtcatgagaccataagcaacacctgccctcttagtgtcttttgtaccatctgtaatgaataaatgtaaatttattctgtaaaacatgacattttgaagtatgtatatacattgtcaaatgcttaattctgggtaattaatgctttacctcatatagttagttaacacttttgtggtgagagcacataatattgtctcagaattttttaaaaaatgcaaatacattattattaactatagtcactgtgcagtagaaaaaaatttttgaacttatttctcctctccaactatagttatgtattctttgacagacatctttccaaacccccctttcttctaaatactttgatatctattgatcataattttactccctacttcagtgagattaagttgtttagaagccatgtataagtaaaatgaaataattatctttctggctcttatttcaattaatatgtactctaggtcaatccatgtaattgaaaataataaaattcgcttttttttttttttgagatggagtctcactctgttgcccaggctggagtgcagtggcatgatctaggctcactgcaagctccacctcctgggttcatgccattctcctgcctcagcctcccaagtagctaggactacaggcgcccgccaccaagcccagctaatttttattgtatttttagtagagacggggtttcaccatgttggccaggatggtctagatctcctgacctcatgatccgcccacctcagcctcccaaagtgctgggattacaggcgtaagccaccgtgcccggcctaaaatttgcttttaaaaagatgaatagtattctcttgtgtatatacaccacatttttgttttgttttgttttgttttgttttgagatggagtctcactctgtcaaccaggctggagtgcaatggtgcaattttggctcactgcaacctcagcctcccaggttcaagcgattctcctgcctcagcctcctgagaagctgggattacaggcgtatgcccccacgcctgtctaatttttgtgtttttattagaaatggggtttcaccaagttggtcaggctggtctcaaactcctgacctcatcatctgctcgcctcagcctcccaaagtgctgggattacaggtgagaaccactgcacccagcctaccacattgtcttgatgtactcattagatactgaacaattgattctatattttggccactgcgaagagtgttgcaaactacacagaagtacaaatgtttctttattctaattttatttgtttgagatatatatccaatattgcaattgctgtattgtagtttgattttaaactttttcaggtatctgtattttgttttccataacggttgtcatttacattcaacccagaatgtggaagaatttccttttcttcccacctttgctaagacttttttttttaaataagagtaattttaacaggtgtgagttatttcctagggtttttttttttcgctttcctttccctgataataattgatattgagtaattttgtttttgagacggagtctcactctgtcacccaggctggagtacaatggcacagtcttggctcactgcaacctctgcctcccaggttcaagtggttctcctgtctcagcctttggagtagctgggattacaggcgcctgccaccaagcctggctaatttttatatttttagtagagaaggggtttcaccatgttggccaggctggtctcgaactgctgaccttgtgatccacccacctttgcctcccaaagcgctgggagtacaggcatgagccactgtgtgcggctgatattgagcatttttttatacatctcttggccacatgtatgtcttttcttgaaaatatttacttaagacttttgctcatgtttatttgtttttgttgtatagtcatttgagtttcttatatatttttgacattaactccttgttacctgcgtgatttgcaaatattatctcccatttttcagttgtttaattttggtgattgtatcagattgtgggcagcattttaaaaatttcaagtaatctaactcatcaatttttgtttgttttctggaatttgaagattaaataaaaacagtcactgcctgttatggggctttcactctatttttttgtagtaattttagagtttcaagccttacttttaagtatctaatttatttagggttgatttttatatgtggtatgagatgcagatcttgttttattgctctaaatgtagctataaagttttctaaacaccatttatttaggatactgtccctaagaaattgtcacctatttatataatcacctatttatatataactgatataatcagttagctgtaaatacatggatatgtttctgctctctcccttttgctccattaatctatgtgtccacttttattcaagtaccatacgtttttgttattatagctatgtagtatatttcaaagtcagctagggtgataccttcagcctattttttctttactgttttgactattgaaggtcttttttggtactgtatacattttaaatacgttttaaaagttatatttagtatgttgctggtattttgatagaggttgcattatatctgtagatcattttgtgtaatgcaggtatttaacattattaaaaataccaattcatgaataatattttttcattttgtattagtttattttaacgttcctcaatttataatgtaaggtgtttcaaatttttgtttaaatttaattcaaagtatagttactatactttataactaattccaagtatagttattatagatgagattgttttttattttattttgagatagttaattgttagtatattgaaattctactgacttttgtatgttgattttgtatactgccagttcaataaattggtttactggttctactggttctcagtaaagtgttaggcttttctctacttaaaattatgtcatctgcaaacagctataatttttttccaatctggatgcctttgattttattttccaatttttctgtcttggacatttagtaccatgcttagtaagactgaaaagcttataacatttccatgtttagtatgttaactgtgcaatttttgttataagcagcatttattaacttgaggtgcatttgtcctatacctaattttttcagagatttattatgaggaaatgtgacttttgtcaaatttttattctgcatgtatctaaatgttatggatgtgaaatcacaatttatcccacttaaatacaaaacatcttcggagactactatgaacatctctatgcatgcaaactagaaaatttagagaaaataaatatactcttgatatacaaaacttcccaaaattgaatcaggaaggaacaaaaatcttgggcatagcaaaaatgtgtaataatattgaattagtgatataaaacccaccaaccataaacagctctggatcagacgaatttacagccaaattttactacatataataaagatgagctggtactaatcctactaaatgtattccaacaatcaaggtggaaattatttctaacttattatatgaaaccagcatcattctaataccaaaatctagtaaagatacaacaaaaaagacaactataggccaatattgttggtgaacataaaacaaaaattctccattaaatactagcaagctgagttcataagcacatcaaaaagttatttttccacaatcatgtgagctttacttcatgactgcaagaatgtttcatcatgtgcaagtcaataagtgtgattcaccagtaaagatgattaaaagcaaaaacttattatcacagtaaatgcagaaaaagcattcaagaaaattcaatattcattcataaaaatattcttaacaaaccagaaattgaagaaacgtacctcaaaataaaagccatttatgacaaaactttatttgacatcatattgaacaggcaaaagctgggtgcattctcaataagaagaaaaataagacaaaaatatccactctgaacgcttttatttaacatagttctggaagtcctagccagagcaatccaacaaaatagtgaaataaaaggtatccagataggaaaataagtcaaattgtcttcacagaagatataattctctacctgggaaacttcaaagatttcccccaaagattcttaagcctaaaaaatgacttcagcaaattcttaagatagaaaatcgacatacccaaacgagtaacatttctgtataccaataacattaaaatcaagaacacagttctgtttacaatagccacaatcaaaaaataatatctaggactacattaaatcaaggaggtaaaatatctctacaaggagaattacaatacactactgaaagatatcagaaaacacaaataaatggaaaagcattccatgctcatggattttgaaaactcaatataatttaaatgtcctaaagcaacgtacagattaaatgctatctctatcaaactgtcaatgccattttttataaattcaataaaactattataaaatttatatttataataaaaaagcctaaatagctaaagcaacattaaaaggaataaacctggaggtgtcacattacctgacttcaaactttactacaagttacaataaccaatataacctagttctggtacaaaaatatacatatagaccaatgaaatagataagagatatctgaaataaagctacactcctgcaaccaactaatttttgacaaagtcaacagaaataaaaaggaaataaatccctatttaataaatagtactgggaaaacttgttagtcatatgcagaagaaaattagacccttacctctcattatataaaaaatataacttaagatagattaaaaacttaactgtgagacttcaagctatataaatgttaaaaaaacacttagtactctagacactagaaagaatttgtagctaacactataaaaatgaatgcaacaaaaataaaaatagaaaattggcacctacttaaactaaagagctgcacagcaaaagaagctattgacaaagagacatcctacagtataaaataaaatatttgcaaattgcaaacaacaaagaattaacaaatactatctatcagaatttattaaaaaacagacaaataatatgaatagacatttttaaaaggaagacataaaatctgccaataaacatgcaaacaatgctcaacattcctagtcatcagagaaatgtaaatcaaaatgacaatgtgataccatctcacaccagttagaatgacttattaaaagttaaaaactgacaaagacaaaagttgtggaaaaaagggaatctttatatactatcggtggaaatgcaaattaattcagcccctgtggaacacagttcggagatttctcaaagaactacaaatagaattgccatttgacccatcaatacaattactgagtatatatccaaaataaattatttgacacaaaagtcctgcactcacatgtttactgcagcactattcacgatagcaaagacacagaattaaaccaggtacctttgaatcttagatccatgttgctgcaaggaacatttttttttttgtggctgcatagtattgcatggtgtataagtacctcaaataccacctgttctcacttataagtgggtgctaaacattggacaaatacagaaacaaagatggaaataataaacactggaagttgtttttttaaaggaaagcattgaaaaactacttatcaggtgtgatgtacactacttcggcaatttttactaagtgcccaaaccttaacatcttgcagtatacgtatgttacaaatcttttcatgtaccccttgaatataaaataaaaataataaaatgtcctgtggtataatgacatgttacatttctccagttctggggtggtaatttatattagaggtgaaagaaacaaaattatgctccctttgggcattggggtgaatgtttctccaggtctgcccacatcctgaaagctaacatatctgaaaggtcttgccctttaacccaagaagtgttttattcccaagtgtgcagctaaaataaatgactatatctttatgttttattttagggctatagggttaacttgttactccactctttttgggaaaatcatggtaagttgtttaatcacatgtcttattttagaataaaccatttttgtaaatgtgaggctgtgaaaattatgttacattcctgaattaaaataaaaacatttttctagtgaaaaaatgcataaaaatcttatggccatagcccaagaaccataaaacagagagtgttggttatttaagaccacactcctgaaaccatttcatcacaaccatactggtgagtaaaggaataatggatcagaaggttctttcagaatacttttcttattctattgcagtgctaaatttttacttgtctttattatttgccatatagaagtctgtacttctaaaaaagatgccatgaatttcaggttaatatgctcacacatatatgctcaccagagcctctagaaggattctggtgtgtttgcaatcgaggtgtgtccattctggcctttcttgtgttgctttgtttgtgtaaaatatgaaggcaagaagtaaagcagagtcaaccaggacatttctagtttctacagcaacagcagctacattttcatgttaggtcaactagaaataatgatagtattccaaaacaaaaaaaaactgatactttatattttttttcttacaatttatagcataaaatttttatagtgtctgaattatagaagttaaacaacttgaacataaaagtgtcatctagataatagtattatttcaatagcttattgtgagtcacaattgccccattgggtttaccggaaaacacttatttatttatttatttatttatttatttatttatttatttattttttgagactgagtttcgttcttgttgcccaggctggagtgcaatggtgcgatctcggctcaccgcaaactctgcctcctgagttcaagcgattctcctgcctcagcctctggagtagctggaattacaggcatgtgccaccacacctggctaattttgtatttttagtagagacggggtttctccatgttggtcaaactggtctggaactcccgacctcaggtgatctgcctgccttggcttcccaaagtgctgggattacaggtgtgagccatcatgcccggcctggagagcacttatttatcttctaagtgtaaataaagaataggttttccataatcctaagcatacagatcttttaagactagcggctgagcacggttgctcatgctgttgcaggaaattaaggaaccagagatactgatagggatgcaggagagcttttattttaggtgtacaccagctcagcagacaagtgtcctcaaagtctgatccctgaacaaagaaagcgagcaacttttaagcgttttgtggtgggaaaaacgtaaagcaggaagcaggtttacggaagtgagaacaaaagcggttaatcattcatgccatgtcttacaacttaggagaaacatgagttgcaactttcacttatctatcttgtgaccttgcagctgcacagcaagaataacagggacttacagaacttacaaaatatgtgggaaagaggtatggttaatgtttcacagacccttagaggcctttagaggagcagttaatattctttttataccttttcttcagggggttacttcacgcctattctaacctaacctaaaagtgtaaatttaatttctttttaattttctacttcatcccccccttttggtgctctatatataataatgtttaatagacagcaccacaattatctagttcttcttgggttggtatatattcttcttggggcgaagcctgatacttagctaatgccattatttgggtagtggtgtgtggccatgattgcctctatagttgactgaacacttctgataagaaaaggcaggagacaagggagaattaggcaggcacctgtgataaggaggaacccacctattaagatcttgaacccatgaaaggtaaaaaaccgtcctctaaacagagaatttggagatcatcttgaccaggtttgaactggaacatgggctaacatctgcatcctggccgtaatttccatgacagctcacctattatcatctatttctagacagcagtttgttgagttaaactttccacatactccttcttctgaggctaggaagtaatctagtgcccgcctgttttgatatatggcattcttcatttgtgtagcttgtacagccagtaaatgtaaagctcttgatgtttcattgattattattttgagcacagtttggagccttatgatacagttgagcatgtaaactggggtgcggtacccccatgactcatcttgtgcccaggtagcaggcccatggtatttgatgattttttcaggaggtcactcattatcttcctagttccctatgtctacatccttttgatgtttgtgtctattcttgtgattatgcttcctttagttcttccattttcatcataaactgattatcttaagagttccccttgctttagaggaattagaaagaaggtggcttgattgttcctaatacacatgtccctgaccgtttagccagcagttgctgatatgcctgcactccacaaatccaatataggccagagggtgctttccaagcatttggagcctctagtggatgccaagaatggcttagaatagagaatcaagagaaaaagtttggatctggtaagcaggagtcattctgggcatttctccatagagtcttatttttagtctcaagataatactgttgccctaggcaggtagccttatggaaggctgcacctttgaaccttgcttgaccaatattaaagtacaaggataaggttcctttgtaggtagatgagacccaggttttatttagaagggctccttctattgacccatcgtgggtctcaaatctccaggcacaagttcaggctcatagcatatataaagctggccatctcctgagtcacaggatgagtaggttgtttggttgtaagtacagaatcctaagagagtcctggtgcattcatagtatgtatggtataataaagttttaactactgtgtttctctccatgtggaatgtatgcaatgtggatatctttctttcaattgtatttctttttgcttagcctcaagtaccactattagtaaaacaagcaagcaaacaaacaaacaatatttttatactagacatgggcaggtaaggtttttccctagacagaaagactggcaataatgatagcatagtaacacggcaatcaacaacactaagacagcaataaaacttaaaatttctatccacatttacttatctgatgacaactccttaagctttggctgagtgtagactactcagcttccagtgtgactagagcggggcttgctattttctcaagcttccgccatgtgtagactggtcagcttccgaagtgaccagagcagggctgttgtcatctccactgacaatgcgatctcgtcgcaggatcagccaggttggatggtctgggtcctgttggctggtccactggtcctgggctgctggttttagccaactgtggtggatttaaggcatgataacctgcaactttaacagcagtgggagtggacaaaattacagtatggggcccttcctatataggtcccagagtagttggattccacttcttaacctaaacaaagtcctcaggtttgaaaaagtgtgctgggtctgccacatttataggcattttttttttcttgcacctaacaatgaatcttttgcatagccagccctaagtcttgcatctgcctttttaaagttaattcccttagttcctgtaggtcacctttaacctgatttataactgggggtggccgaccaaacaaaatctcatagggctaatacccagtttgttttgtggggctgcacctgactcagaggaggaccatgggcaagacctgatgctatcttagatgagtttcttgacaaaatttcttcaacagctgcttgagtgtccagttaatgcgctccacttttcctgagctctgcagctggtgggctatgagtaacttccactttatttttgatagtcaagttaagtcctgaactatttcagccacaaatgctggtccattgtctgatcctagagttagaggcagttcaaatctggggatagtgtctcttaacaacactttgatcacctcttgtgctttctccatctgggcggggaaggccttgacccatcctgaaaaggtgcaaacgaataccaacatgtatcaataaccccccgcttgcagcaatttggggaagtccataagcaggttttcacagggtgtggctcttgtttcttcagttctcggtggccgggtaggcccttgatgagggttgttctgagcacaagtcaaacactgctcacaaacagtttgagtgatggcagtgagctatggcacacagaaatgacgctctaataatgtctctagtgccgtctttcttatgtgagttccttagtggaactatttcaaaaatctgggggctaccatctcaggtatggctagttttctattggagaacttccaccatcctccttcaatataattcccatattcctgggcaaaccaatcccttttattaggagcgttgcttggggtctctgggaaggggatctccgggaggagaagcatagctaaagcttcctcttcagaaggtggatatgtcattgcagcccactttgcctttttgtctgcctttctggtttttgtttgtttgtttttggtgtctaatgttcctgccttctggtgccccttgcagtgcattactgctacttgttttggggctcatacagcatctaagagctgtagaatttttccttatattttatgtctttactttcagcaggtaagagtcctctttctttgtaaatagccccatgaacatgcaaagtagcaaaagcatatttggaatctgtgtaaatatttgccttctggtcttttgctagccagagagctcttgttagagctattagctttgccttttgagcagaagttcccatagacaaagactgcacctctactactgagtcaaaagtcaccactgcataccttgctcggtggaccccctgtagtatgaagctgcttccatcagtgaaatatttaacgtccaggtccctgaggggcctatctgtcaaatttctctggcctgagaacacttcatttgtcacatccacttagcaatgaaggggggcctcctggcactgactcgatgtgaagcaaggtaaccaggtttagggtattcacagtttctaaagttatgcagggacttttacattagatccctttgtattgggttattttcggatttgataactaatggtgcccccttaagtccattaaaattataactcccataacccagtgtggtacccagtttgttagttgttgtcttaaagtcagtttattagcttcctatgccagcaggaaagtagttaattattatttgcagatgatatcttcatttacttacataacaaaagcaactaaaagactgttttaaaagtctattgagacgggtaggcaaaattctaagataatccccaggattcccagtctgttgcacacccactgtgtaattctttttgagtgtaaaaatatgtgtgaatgtggtacgaaatgtctcataaaatttgattactcgtgttgactttgtgtttttcaaaagagacattatcctgattgggctgaacttaatcagaggtgttttttagagaaagagacacatcatagaaaaacactcctgctgacctggaagtgaattctaattgggctatgttgtaagctacttatagtggccacatgacagaaaatatatttgtatattgtcatcattcctgcctcttgcatattgcttctggtaaagagggcaggaggatcccatggcagaggaataaaagaggttcttattcacgcaagaaataattacttctcatctgagatagcttaagataaacagagaagatgacaacatgactatatcaatggcaggagaaagaaaatctggctgaaagggctcactggcattatggagcaatatttagtaagccacagtgagtgatcagcctctgagatatcaacagtccacaaagaaggctgaactcattcttattctgattaaatcagcatgtgtgccctattctggtcgcccagttttaccaccattacagaaattaccatggagaccagtgggcaccctcctagaattaacattatcatgaaaaagcatacctaaatatttgtttttacagttgaaaaatattgaaagcctaataaacttattaataatgaatttatcttctgataattttagaggaattctcctatactgtaatacaatacttagctttaaacacctatatacatatgtatatatatttctttttttttggaagtagagtctcactctgttgcccaggctggagtgcagttgcatgatttcggctcactgcaacctccactttctaggttcaagtgattcttctgcttcagcctccagagtggctgggactacaggtacacaccaccacacctggctaacttgtgtatttttagtagagatgcagttttactatgttggccagcctagtttcaaacttctgacctcaagtgagccacccaccttggcctcccaaagtactgggattacaggtgtgagccactgcacctggctataatataaatgtttcttaactgcatgagcaaatatgtagatagtttcccttagattaacatgataaagttacaattagagaaagcatctgaaattagataaaattaaaaccacattttttcagtggcttggaataactgccctactttatgaaatggccagattactaactagaagcaaagacaagattttggctttgctcaattattaagtccttgaccttttaaaatctaaaatcatgactaatggatttgaatggactattttttaggtgtcttcctaggatttccaaggcaatacaaaaagaattttaataggcaaaaaaaatgcactcaacacacacacattgtttttttctgatttcctgtattattgaaaagttgaagattgcaaatctagtctattaatttagagttaataacaaaagatttttcagtcaagcaaataattgtgtaaaactaatgggtaatggatgctcttagctgccaaataatagtatgactagattcagtaagtatccagccatgcaaatgacagcccaattaaattaagaccctaataggtgcatgtggaaagcactgatgtgcaatatggtgcaccttcactcagcacctttatctgcttgtttacagaaatgccagtttcccctgaatgactctgggtaaatgctaaaccatattgaaaacatggttaacacatttcttctatattataaagaaatttcatgaattttactctgcctcagaaaggcttttagtaaaagagtattcatttatagtattctttggatgcattaaaaatttcaatattccaggtaagtcagagacatttaaatgtcaacaaaattccataaaacgtatttcaatgagatcaagtcttcctagctaaaaattttattttatcagtaaatttagagaaaaatagaaaatcagtactttgggtcaaataacagtgtttggaatgtgagtatcacccagataaatgctcttaatcattattattaaagtagcaatggcaccacgtgctttcctgagacccgctggtctgttttccactgatataaagtgaagaaggcattgaaatagcgaagggaggtgatacaaattgaatactcacataaaatacaatttttaataaaaagcatttaatgttgtacaagtatagatgagactattagtatgaggtcataatatttttacttctattgacagaataactttattcacaaaatttttatttcaaataatattgttttttctgctgtatatttgcaagcttttagtcaaatgttatctgagctcaatagaaatcaacaaaatgaatctttatttttccacaagcattttattcaggcatatgcttatttttcttaaaatatgttagcttttaatgaatgatttatactttttttcagtgtgttgtttatcgctaagaagtggttgtcctcccaggaaactgctattctcagctctacctacattgactaatagtgagaggaagtgatgtgtggataagaagcaaatgtgtcttcactgcatctcttttttaattcgttcactgaagaaaggaggatgctaaaagaaaatgaaagaagatataagccctgaaagatcatgaagaagtcctcttaaccagaaaaaaaaacccacaggggatggtgatgtgagcagaaaatatattattttgctaaggctctgaaatttcagtaaaaaacctgcattgctttaacaaatatattgtttcttcagttttgattcttgaggatacgattcaattcactggtgaatcaaaactgagagaataacatatttgttaaggtaagtgatgtatggaagacccattacgttagaccaacatcttctccacctccagctgcagacaatcatcattccactctctgttgccatgagtttgaaagtttttaactttacacagaaatgaaatcatgtgtgtgtgtgtttcctgtgctggcttattttacttagcataatatccttcaggtttatcaatgttgtatcaaataacaagatttcctttttttttttaagggctgaatagcattccaatgtgtaaatataccacattttctagaagtgttttaattttaaactataaactatgactgttaaatacttttattttcatgccttcttttgattcatattttggctgattgacaaactatgttttaaaaaaatttcttggatcaagattattgatatgggaggggggcatggaggtgttaggtagagaagggtggggtccctggtgaggactctgcccacaggcctgtgcccacggacctaagtgagaacaggcactcttgtttttgcatgcaaatgttgcatttttcaagaccactctggcccaccatgcctccattgctgtgcccatataaaccaagaccttagtgggcacacacacaaacaactgaatgagaggagtagaagaacacagtggcagacagcagaagaaagtggcagagaaaaaggaaagaggcatctgaatgttgagaggagttcagccgagaatggccaaactccaggggaagattatctcctctccctccaccttcccactacagctccccatcctgctgtaagtcacctccactgcttaataaagtctctgcatttatcacctttcaaacagtatgtgtgacctgattcatccagaatgccagacaagaatccaaggcggggtgaacactcagctgttcctggatggcaaggctaaaagagcacactgtaacacacatccattgggctccagcatctgcctgtctgagtgctcctgcttccctcaggggtttgagctgtggggtgactgaacaggtgagccacacccctgttgcacatccttcaaggggaatcagggaactctcttgtttcagccgaaggcttgtctgggataatcatcagcagagtgatttacaaatgtgaaattgttggatgtgcctcttttgtaagaccctgtcacccctctcttttctcgggtaaaagcctttgtttcccttcacagaggtctcattggcacacgggactggagcagagacctggggcaactgaagacatcatttgctggaagactccgacactgaactttgtcagccaggacccccagacttcacttggtgtcttttcttttctcacagtttacagtggctcttatcacttcctttataatgttaagggttttgctacaggctgcagcagtgatattaaataaagtgagcatttggctcagctatcaaaggtacaaatcagagcaatgtggttttcatttagaggtgccatccttactcccaccctggtagccaaaggggcacatggcacaggacacctcctctctgtaccgcctcccctcccagctcaggtgcctggtgtgtccactgcatgcaaaagctgtgcccaacaaccatgaagggtggaagaaaaccacagctgcttctgggaccccacagggctggctggccagtgcttcctgctcaccacaccaacagaactttttaccctggccaaggaatacaaacagtctgaaccaacagaaagatacaatgatcaaagggacctatttgcactgtgcaagggctacctcctcttttgcctttaaactcctttttcttttcttttcttttctttcttttcaagtgaaagcatttccctccccagcacgctgcttctgacagggaagttaacagaggagtgacccctgctggcagataactgtaaatttggcagggctcatttgagacaatctaaacagatagcttcagccccttgaagtatttttagtcccaaatttgattccaagcttcaggttgagtccctagaaagaaaaatcagatctgagggacccaaagccaggcagcaggcacaatgtaaatgggcaggacaaaattctgctgactaaacccccgccccatggaaggaggccatgccccttggcataaatgaggcccagggaactcaaaggttgtcaacagcagggggagatggaggcataggtgaggacagatcattcttttgatttctttctttctttctttttttttttggtttgtttgtttgagagacaaagttttgctcttgttgttcaggctggagtgcaatggcacaatactggctcaccccaacctctgcctcttgggttccagtgattctcctgctttggcctcccgagtagctgggattacagggatttgccaacacacccagctttttttgtattttattagtagagacggggtttctccatgttggtcaggctggtcttgaactcctgaccttagatagtctgcctgcctcggcctcccaaagtgctgggattacaggtgtaagccactgcgcctggcctcagatcattcgttttctatgggccttccctgcttcatagatgaatgctacattggcactcatgggtggcacctgccaaggtcaccaggacttggtgataaaaagatgaaagagaaagggaaaatgcttgctttctctccccatcacaccttgagttttcactgaaagaaggaagggaaatgaggaatgcctgtattccctgtctttcaaaacaagcaagtagctctcttcaccactcctagcttatacttctttggagtgtatcctgaaccattgcaactgccttgaccctcagaatctggaggaaaaatgcttcatagccctctgtacacaggtttggccaaattatgacttacaacaaagactagcttggccttaggaatgaaccattcattctgatgccatgtggctattagaccttttctgcaaacatgagaacaagtggtctgaggcccgatatgtgcaggctttctatatttttcagggcaatcccaacctttgccatcagcgggattgatccagctttcctgtatgccatctcaggagaggctgccaggagcaatctcagggaactaaagaaacaaactccagatgttcccccagcagagaagccagttccctctagccctgctcatccaggccaccctgacctcccaattcagcttcagcctctcacttgccccctcctagaaattctcaccctagacaagccctggtttcactcttgctccttcaacagatgcctggtaaatttggccccagtaaggtccagatccccttctctctacagggtttaaaacatattaaggggaatctttgaaacttatcagatgaccctgaaagacatataaaggctttccagaatttcatccaaatatttgaactctcctggagagatattatgttacttttgaattagaccctgatggacagtgagaagcaagcccctttgcaggcagtagagagatttggggatgagctttgtgttacctatggcatgaggaaagggggcaaatgttattcaactggaagagaagcagtaccagtaaatgaccctggatggtattccaatgatgagatgggagactggatagggagacagtttcaggtgtgcataaggagggcttatgtagggccaggaccaaacatctcaattatactacgttatccatgatggaccagggatttgatgaaaatctcactgccttcttggaaaggctaagagaggccttggtaaagcacacctctctatctcctgattcagccaagggacaactaatcctaaaggataaatttattgctcaggcagcccctgatatcaggaggaagctgcaggaacaggccctgggaccagacagtattttagagaacctcttgaaagtggccacctcggccttttgcaataagtcactggaatagattcttgaattcattatacccaagtaaagacctgggaatctgatggagccacctctgtcaacccagaagagtacccaaagtaccaatgtgaagagatcagagacctccagctaaaaatcacaaaaggtaagtgttaataattaaccttccatggatttcctctttatagtcttgtctatgcttgctgttcttacctttgttctgatctataaccacagggcacaatagtgtttttagaataattagtatatttcactttttatttctgaaatctttggcactaaattctttactagtataatacatgttttacccctgcgtatctaaccttatggaagttttttttctttctcacacctagaggccatcaaattccaaaaaggcaagcaactgaggtctcggacaatgactcccctttgccaggaacccttaggtagacatctgggacaaatctgactgctgtttttctcaaaacaatgccccctattggcaggaagtagctaataccagtggtcatgtatattctaacggcgattagatgtgcctcttcagaggggaaaatgatacgggaggggacaaggaagtgcttggtagagaataatagggtcccttgttagggcttcatcttcaggcctgtgctcgcagatctaagtgagaacaggccctcctgtttttgtacccaaatgttgcattttccaagacccatctggcatgccatgcccccaattatgtgcccatataaacctgagaccttagtgggcacacacacaagtggctgaatgccaagtggaacagaggaacagagtggtggagagtggcagagtacagcagggcggcacagcagaggagggaaagggtgtctgaacgtccagaggagttcagcaaagaatggccaaacttcaggggaagattatcttccccacctccaccttcccactccagctccacattctgatggaagccacctccactgctcagtaaagtctctgcattcaccacctttcaaacagttcatgtgacctgatttatcaaggacgctggacaagaatctggtggggttaacactcagcggttactgagcagcaaggctaaaaaagcacagtaacacacacccacttaggacctagcatctgtccatcgacatcctcccccttctctcaggggtttgagctgtggggcgaccaaacaggcaagccacgcaccttcgcacatcctgtgaggggaatcagagaaccattacttcatcatcagcataattcaagacaaaatggtaatgaaaatcaaccttgattagtgaaacaacaattatctgacccctggtaatcattttcactcccacccaacatgaaagctgcatctctgtgtcacctctcccagttgtaaaaaagaggattctgataaaattaatcagcataaagttttctgacttttttggtctgaaaatttaactgatctcttaccaaaaaagttgatattttacatttatcattttactctattctattaaattttttagaaaaccgaatctgacaaagcatacatttaaaaattaaaaatacttatgaaacattcttatagaaactaaaactaaaaataattttagattcttagagagcatctctcaaatacttcaaattatatgcctttaaccatagatatttattttttattttgctgtgatacagtttggctgtcctttgtgtcaaactccatcatcatttttattctattttgttgtgtagtatttatgttatgcattttatatatttaaaagttgtagtcccggccaggtatggtgactcaggcctgtaatcccaggactttgggaggctgaggcaggcagatcacttgagatcaggagtttgagaccagcctggccaacatagcaaaaccacgtctctactaaaaatacaagcaaattagctgggcatggtggcacacacctgtaatcctagctactcgggaggttgagccacaagaatcgcttgagcctgagaggcagaggttgcagtaagccaagactgcatcactgcactccagcctgggtgacagagtgagactccatctcaaaaaaaagaaaaagactaacttgaaagtgaagaagcttggcagtcaccaccttaagcaagtgatcaaagtgagtatcattagaaatagaataaatcaaattctgccccatagaatacaatgagtagaaaatggcatcgcttctgttattcctgccaacgatgcatatctgaatctaatggaaaggaaacggacaaatgcagatcaagacacacactacaaaacaactggcctgtcacctccaaacatgacatgggtttaagtcacagaagcaccaaggaactcttccagactgaagaagacagcagacgcatggcaactaaatgcaacgcatgattgtcagctgggttcttttgctagaagggacaatactgagactactggtgaaacttatatgggacctgaggattgcatggcagtaacacaacatcaatcccctgatttagtggttgcattgtggctatgcaggagaatgtccggttgtaagaactgtacaccaaagctttaggggtgatgggacatcaggttggcaattgaccctcaaatgggtcaagaaaaaagttctttgtactgtacctgcaaccattctctaagttgattattgttttggaatgatttattgtaaacatttatttttaaaaattatttttaaaatgacattttgaatttcaaaggatgagaaattcttgacaaaactgatgaaatcttaaaatgcttctgcaaatcaggcctcagaagtcatgctgtgtccggaatgggtgggtgtcttggtctcactgacttcaagaatgaagccgcggaccctcgcggtgagtgttacagctcttaagatggcgcgtctagagtttgttccttctgatgttcagatgtgttcggagtttcttccttctcgtggtctcgctggctcaggagtgaagctgcagaccttccccgtgagtgtcacagctcttaaggcggcgtgtctggagttgttgttcctcctggtgggctcgtggtctcgctgccttcaggagtgaagctgcagaccttcgcagtgagtgttacagcccataaaagcagtgtggacccaaagagtaagcagtagcaagatttattgcaaagagtgaaagaacaaagcttccacagtgtggaaggggacccgagtgggttgccactgctggctgaggcagcctgcttttattctcttctctggcaccacccacatcctgctgattggtagagcccagtggtctgttttgacagggcgctgattggtgcgtttacaatccctgagctagacacaaaggttctccacgtccccaccagattagctagatacagagtgttgacacaaaggttctccaaggccccaccagagtagctagacacagagtgtcgactggtgcattcacaaaccctgagccagacacatggtgctgattggtgtgtttacaatccctgagctagacataaaggttctccacgtcccaccagactcaggagctcagctggcttcacccagtggatcccgcaccggggctgcagatggagctgcctgccagtcccgcgctgtgcgcccgcactcctcagcccttgggtggtcgatgggactgggcgccgtggagcagggggtggcgctcgtccaggaggcttgggccgcacaggagcccacagagtgggtgggaggctcaggcatggcgggctgcaggtcccgagccctgccccacaggaaggcagctaaggctcggtgagaaatcgagcacagtgccgatgggctggcactgctgggagacccagtacaccctcctcagccgttggcccaggtgctaagcccctcattgcctggggccggcatggccggtcagttgttccgagtgcagggcctgccaagcccacgccgacccggaactccagctggcccgcaagtgccacgcgcagccccggttcccgctcgcgcctctccctccacacctccctgcaagctgagggagcgggctacggccttggccagcccagaaaggggctcccacagtgcagtggtgggctgaagggctcctcaagtgccgccaaagtgggagcccaggcagaggaggcgctgagagcaagcgagggctgtgaggactgccagcacgctgtcacctctcaatacttgatagaagtgacatacactgtgtataaaaatctcaaacactgattcctccttggtttgttttacaaattagcactcttccaattaacaaacttggttagctaaaaacactaaaaactgagtgtcttgttcccttttgtgaataaaattccagccagaacatttgttttttactaggaaacattagtccccactctaaattaaagtactatacgtggcctatgcccgggatcaattatccttggaaaacaaggacctcccgtacatacttgctactagtactgccaagcaaaggcctgctatgctactgcagaggctcctgtcccagcccagatccaacaggactggcaggaaggtgtagccaggggggtcaccatgagaatgacatgatgatacctacctgacaaggctcaatgagaattaaatgcaagtcagattttcaccttgatactagcatttgtggaagcattactcgtttttgttttgttttgttttgtttttgtttgttttgtgtttgtttgtttgagacagagtcttgctctgttgcccaggctggagtgcagtggcacgatctcagctcactgcaacctccgcctcctgggttcaagcaattcttctgcctaagcctcctgagtagctgggattacaagtgtgtgctaccatgcttggctaatttttgtatttttagtagagacagggtttcaccatattggccaggctggtctcgaactcctgatcttgtgatttgcctgccttacctcccaaagtgctgggattacaggcggagccacctcgcccagccgaagcattactcttattaacttaaatatcaggtttgaggtctagctcacatcatttcttcactcctttttgttctgttctcagtcattccatgacagttcatgtagtagtaacaggatttctgtctcctatgggttgactggcctgggaaatcttttatctcaagtggtcagaatgtgaaaatctagactaagcatatgtacaaatgaattcttagaacacagtaatcaaatcagaaacaaaagccaaggccaccccccacccaccagccagcaggaagcctgcaagacctcaaatcagagcacagcattggtgagagccgagtgagaaaactcaaaaactctggctgcaaacagagctggcatgcctgtggcttattattgctcactaatcaatgttgattgctcatgagtccagaaaatttgatgatatctgttcaactgaacattgacatgacaggtactatgccagatactttgctgacatgatgtcacttgaagttagttatcttatatacagggtaggtacaattattatactcattcttcagacagtaaaactgaggactagagaagtcagtagctcattcaaggtcacacagctagcaagtgctaaaaccagggtttaaacctcagcaattggtctccacagcctaccctcaacttctactctaaactgcctctcaccaaccataatttgtgactcaacggcacccagtctcttatatcacacatgcgacatgtttgtcacagcacacttgcttcacatttccacacaccttccttatttcaacagtaactgtgttgcagggtaacataaagcatggggcctcatttgtgtaacactagttcacagcaaaggcaaaaagtccaccttctggacttggagacgcatgctgctacttctgggtttctctttagttgacaaagtaataagagctgttacaataaacttctttgttatttcatttaaaatgttgcctttttttgccaggcaaaaaaaaaatttagtataatcatgcatgcatgcctctttatgtatggcaagctacttacttcttttttctagagatcatagggtccagaaaacctttcgatgggttaaatagggtcatttaaaagagaaacttaagtctacattggatggttctggaggagtttccccttccctggagctgctcaccagttaatttaggaataaaatagtctcccaacctagcaaatcccaccaccctacccaggggttttcacaaaattatcttgttttaatcatgttttagcatggaaaaatgacacatatctcaaagtatacattttgaggtttttgatatgtatatggctaatttaggaaggaatattttaccacactcctggtttaggagataactccagtcacagatgtcacactctggtgacaagtgtgtgccagctcaccactgccaccatctgcctagggcctttcctcttcattcttcaagccaaaagcacagctgatttgttgggtaatgtttcttgatagctctctagccaaaaatatatgtggttcagaagtgttgttactatagctctactcagctgggtctcgtttctggaaaccatatttagttgtcaaacagtataatgtgacagaaagattttgatgacttaaaccaataaatttcaaagttttcaatagtaaggtttcatttaagtgataagggcaatgcttaagttatgatggcgagaaaaacattgctcaattgactgtattttgttcttctataatcttaaaatgttccacaacaggcaactgcattaaaaatattgtagcatggaacagatcctctactttacaatgaacaaagcacttctgttacacaattaacatgcaaggaaaaactaaggtagccacctgcacatgtccaaacactgtgaccatatcacaacccaaccatccagtttggccaacaggaaaatctactcctgctattgcagaatgacatctgtcttctggtgtcaagcttggaacccacttatttgacccatactgctattatttaagtttttctgctccgagctccatcttgagctccaagctccatcattcctgagctccatcttgctctcagctttctcttgctccagcctccatctccttcaaactccatctggtttggagctccatttggctcatagctctatatgctctgagctgcatcttgatctgagctccaccttgctcggatctccatttgctctgagctccatctgctctcaactccattttgattggagctccatcatgctcagagttccaccctactctgagctccatctgctccaagctccatcttgttttgagctccaccttctttggagctttatcttgctctgaactccatctggcttggagttccatctgctttgagcaccatcttgctccaaaatccttttactccttgctccatcttgcttgaagcttgactttgctcagagctccatctgctccaatctccatctgtttgagttccatctgctcggagctccatcttgctaagaattcagagctcctgctctgagctgcatcttgctcggaactccatctactcatcttgcacagagctccatctgctcagagctctgacttgctgggagttccatcttgctcggagctgcatctgctcagagatccaacttggttgaagctccatctgttcagaactccatcttcctgagagttccacctgctctgagctccatcttgccagcagctccatcttgctcaaagctccatcttgccagagtgccatctgcccagagcttcatcttgctctgatccagctactctgagctccatctgctctgagctccctcttgctctgaactccatcttgttcagagttccatcttgctcagaattccatttgctctaaactgcatctgctcagagctccatctgctctgagctccctcttgctctgctctgagtaccatcttgcaggagcagacaaggagttcaagtctgtttgtagggtagtaccatgctgccaggttaccgctgggtagtttcccctgccctgcagcatgaaaaccaaaaggacgtttccaaggtccataagatggaatgggtcagaaagaaaaacaaagttctgatgagcaggacctcctcccactaaggctgacaaatacaagatgaacacacagtgagggaggcacccatgccccctgggcttgggaggccaacaagagctgcccacacacccatcacaagtcatcacccagcttaggggtgacttgtttttaatctgaaaggtcaatgttctacagcagagcacaaagcgcagatgtttccactgaactaagagacagtgtgggggcagaacttagcactatgactggcacattgcactcaaaaatgttggcagacatggtggtccttcccctctgctcgcctctgtcctcatgagccttgccacctggcatggcatgtgtctgcctggtgcaagcatagcccatctggctgggaacttcctgaggcaggagcacactttgcacatctctgtattcctaagaacccaaaagcaaatgcaacaagaacaaaaataagtaaatgggacctaattaaactaaaaagcttccacacagcaaaagagataatcatcagagtaaagacaactcacagaataggagaaaatatttgcaaactttcatccattaaagtactaatatccaaaatctacaaggaactcaaatcagcaagagaaaaaaggaatgtcatcaaaaagtgggcaaatcacatgaataggatctgagccccctcccagccctcagaggtgtcatctttgggagctccagggagatgtcttggggaaaccctggcctttgggacaggtgaagtgcaaggccttcttgggcattgctaggtgggcctggctggccagaggggtgcagaggacccaggactagcaggaaccctggctcgtcactgtccttcattctacccatcctcaccccaccctcacccaggaccctcactcagggccttttcctcctcattcacctctggccttgcagagacagattcctccttccatctgctatatcatccaagcctcacggaaccatgcagggaggcaggagagggaggaccgtgcccatttcacagcatgaacattgaagctcaggagatcaagtggcttgcccaaggtcacagtagccaggaggtggaagagctgttgcttgaagccagggctctagactccaagtccagtgctcctcagttccaccctcgagcttcccttcctttcctctccccactgctacccaggcccctctctacaaccacctccactccttctgtctttcctcttttctctttctgtcttttggttccaccaaacccctgtggaggtgaggcaaggaatgccccatgaggagaaagggaggggtgagactagagcagggagctggaaagtggaggtcaggctgctgtgctgcaatcccagcaggtggcctctacaccatggtttatatgaatggagttgtgcaatgcagggcctaggcagctggatgctgcaaccctagagacagggaatggtgctgagctttggagtcaggatgaagcaaactccagggcagtgggaaacttagaattgaacaggatgggtgggcgaggtcctggccttgtgcttgttccagtcaacttctcaggagaatccaaggcttggacaaagatggcactgggagagagcaggcaggctcagtgtggccaaggagtgggggaggatctgaactcggcaggggtcttgtatgcagcaggggcttggtccctcacaacatggagcccagggaatgcttggcagcacctgggaggtgccaatccccagtggcagtagagagggctggttccacactcacactgtcttctgttctatctgtgtcagcatccctctctctcctttcccatgcctgtgacatcctctccacccctggattcctgtccctgcttggctgccagcccccttctcctccccacccacgactgctcctcctactgtccccaccttctccccaggtgcaggatatgcctcttcacacctgacctcgcttttgaagccacagtgaaaaagcagatgcagaagctctaagagcccagtatcaagtgtgtggatattgtagtcagtgagttcacagccaccatcagaaagtgcagtgaaaaggtaggacagatgcctgggtggggctggacttgaccatccatcctcgtggccatagcttcctgtagccagaacgatctgctgaccaggcctctcagccacccacagggacccagccctagtgtgtcctgccagcttctaaccctgggtctatttgcacttttgaccctccagacccccatccctgcccaaggactttactccaacccaagtttccttggtggcatctttgcatcaataagaatgccagtgattaaaatgatgttaaggagatggcagctgtttattgagcacctactatgtgctgagtactgggctaagcacttgcccttactatctgactcagtcctctcaaccaccctaagacatgggtagtgttgtttttcccatcctacagacagcaaaacagagtctcagaaaggaaaagcagagagtgattcatatttaggaaggtcagaggaagggttctgaggtctggacctcctgggcacagggagctgtcttggttcctcaaaaccaatttgcctaaaggcatattaaattacttgctttacaataatccacatgtgatggggcagcctcttttgagttgtctgtaacttctttttgtttgttttttgagatggagtcttgctctgtcgccaggctggagtgcagcggcacgatcttggctcactgcaacctccacttcccaggttcaagcgactcccctgcctcagcctcccaagtagctgggactacaggcacgcaccaccatgcccggctaattttttgtcttttagcagaaacggggtttcaccatgttggccaggatggtctcaatctcctgaccttgtgatctacccacctcggcctcccaagtgtctgtgactttttagatgcctttttcctatttgtctgcttttgggcattttgaggatttttaaccaggttttctaaagcagttcttcccaggggagtgcaaaagaatcaactggctgtaggagcttctccagcagactgcatcagagctgctggggcagagctcagccttgcctgtatctgaaggagttcgctatgctggggggtggaggcacatcctccttagcttcaagtttcaagtaagcatcaatcatctcctttcttttttactgagcagtgtgttgtggaatccttgtatattgctacacaaagattagtctcatgccccccaccttttttttttttgagacagagtcccactctcttgcccaggctggagtgcaatggcatgatcttggctcactgcaacctctgcctcctgggttcaagttaagtaaagattggtctcatgaacttgaactttacattcaagcgattcttcttcctcagcctcccgtagctgggattacaggcacatgccaccatgcccggctaatttttgtatttttttttttttgtagagatagggtttcaccatgttggccaggctggtctcgaactcctgacctcaaatgatccacccgcctcagcatcccaaagtgctagaattacagacgtgagctaccacaccagctggtctcatgcccattaactgctgagttgtatttcacatgattcacatgttcgatgtcctattgatggacatttaggtttcaacttttttacttttttcttttttttcttgccttcacagtgctacaatgaacatctttacacatgtatttgtagtacttatcccattgtttctttcttttttagagacagggttttgctgtgtcacccagagtgaaatgcagtggcacgatcgtagctcactgcagcctcaaactgggctcaagcaatcctcccgcctcagcctcccaaggagctgggactacaagcgtgcaccaccacacccagctaatttttttgttgagacaagatcttaatatattgcccagcctgctctgaaactccaggcctcaagcaatcctgctcagactccatcagtcccttcttgatagatatttgggttgtttccaaattttactgtaattacttctttccttttggaaggagaatcaaagtgttccatggtttttaaatgtttatatctaacaatcaatcttctaggaatctatcctaaggaaaaaatcctagagaaagagaaacaaaattctttatccacaaagatattcattgttaggttatttagaatattgagaaatcagagattattaaaatgtccactaataggacaatggttaagtaaacttaaataaatctatccaataagatattatgcacccattaaaaatgtttatttaggctgggcactgtgggtcacgcctataatcccaacactttgaaaggctgaagcgggaggttgcttgaggccagaagtttgagattaccctgggctacacagaaaaaccctgtctctacaaaagcttaaaaaaaattagccaggcatggctgtgtgcacctgcagtcctagctactcaggaggctgaggcaggaggattgcttgaaccgaggagttcagttaaaccactgcactccagcctctgcaacagagtgagagaccctgtctctaaaatcaattttaaaaaagttagagaccagcctgggcaacataggaagaccccatctctacaaaaaataaaaaagttaggtgggcatggtggctcatgcctgtagttccagctacttgggtggctgagatgggtggattggttgagcctgagaagtcaaggctgcagtgagccatgattgcgccattgcaccccagcctggaagacagagcaagaccctgtttttaaaaacaaaacaaaaaagggattcacatgtcccgccacagtgtactgtgggaaaaaaagggagtttctgaaaagaatgtatggtattttggagaaaaaatagtatttatgaatgataaaatcccaaaggcatattcaccacagaaatattttcatgtccaagtcacaaattttagccatgctctaatcttttacagtgagtctgtgtgatttttgtgggcagaaaaaactgatcaacaaaatctttgaaaagaaaagctttagtctaaaaggaggaaaataatacttttgccttttgatttgtttaaggatcataattattttttctttataggcaaaactcacccatctttgtatactcatatttttcctctccaagtttctaagtttagcaagccacttctgccagaggtttgataagtgttaataagtgaatcctaattaatcctagccctgctgggattagacttgccatctctgaataaaatctagagtttaaggccaaggtgggtgggtcacttgaggtcaggagttcgagaccatcctggccaacaggatgaaaccctgtctctactaaaaatacaaaaatgcaccctcaacagaatcctaacaacaactgagatctggccaggcactccccactttccccagcctctgccttccaagcacaagctcattgaatccaaacagccttcggtggtaggtactgctatcaaccctcttcctgaggcccacatgaccaaaccactcagccaaggccacacagcaaggcagtgctgaagtgaggattcaaacccaagcagaccagcttcagagctgtgccatgcaacccagaggcatccgggagtccaaaacacgggccctggtgagagagggctgcacaatgtgtaccctgaactgtgcctcctcacacggcccagacaacccgcaggaggctgggactaggccagaggcaggggggtccctaaaagtacaaagtcccagtggcacaaggtccccaggcaggactggatgtcaagtgatacccacctattaagggctgggttttgggctatctcattatcatttattccccataaaacaaaaaccctgaggtagggattcttttatccccatgtgacagatgaggacacagactcagaaaggccaagtgactccccgaaagccacacactggttagcagtggagccttgattcaaacccagaagggcaaacccaaagccccttcctctcacacctcatccctcctcacctcaaggccagtttactgagcagagaggaactcacgcttccagattcaccccatacatttaacctgctgcgcagcaaatgcctggactttgcctggcagaaaatgatcatgaaatccctgggatgggggcagcctgggccctcaagaaacatcccaacccacattcccattgcccttgttgaggaggtcagtcctgggaaatcctactcccttgttccttcccaggttccatctgagctaagtgcctccaggaagggcagggagccccatctccacacacagcacgggaagagggggtgtgacacaggcctacatcagaactctcaccagcctcagcccctgcagacccggtgggactgggctttgcttcttgttagactaagggaaagggggcttcaatgacagtctagctcactagaggcagaacaaactgccaccagttccctgcccacttcttgcctggagaaaacacccgctcctaggtggtgagtgtgagcagcaaattcaggcccacgtgggccaggtaaattgggctggctgccatgcccctctcacctctcccaggcttcccgcacaagcacgcaggcaggttgcttcagccccaaatacagcagcagaggtggtggtggcaaagggtggggcaggaggtggagggtcaggcttacagacgggacggaccctcaggcacagtgacagcagcccagccactagggcctgtccacaagccagggctggccaggatcaagcgagtcactcagggtcctcccagctccttccttccctccaacactgaaggctctcagaagaaccagctccaaaaagggagcttgaagcctctttccaacctcccagtgcccacctcagaagcagggctgagggcagagatgttttataagccaggacccctccccatgcaagggtcgtatggaccggtgtgtgtaggggcagacctgtgactgacatccacctacacctgaccctcatctctgaactcaccccacttccttgcatacattgaagaggaaatggcccacactccatgaatgccggggtctgaggtgggtgacggcacccatgagcccctgccagagtctgtccacttcccaacagacccctttcccaccttcccatccccaaccatgccaaggccttcagggatggagaatgaaatccttcctcctgcctcacaggaaccactcacccacacctgcagcctctttccatacaggactctgggacacagggccatcagctccagcagcatctaacacgagcaggtccacagcaaccttgctggtagcctctcttctgctacttcctgggtccacactcagcctaggtgggaccagcctcccccctgccaaggtgaggacaggaagaggcatggctagggagctgtcagtcatacctcatggtggtaggcagcatttaaagccaggtggcacctctcacctggttactcgtcaccccactcacacagcctgacacagcctcactgcctccccatactcacagagaagcagattcagctcctgctgctctaggctgggaaaggagcagcgggtcagcctctaccctctttctctgagaaccagaccatgccccaggctgcacactgctggcagaatcagcctagggggtaaaaagcttgggttctcagcccactccaggaccaggatggggcctttcatctaggcttctgacacccacacactcggaggtcctggtccccatggtaccccagtgcccagcacagagcctggcacagatcaggtgctcaaatatgtgttaaatgaaaacaaaataggatgagatcagtcccttactcctactatatgaaactgcttctccctccatcgtatggcgtgtggaccaggaggcctcgggtccttccggaccagacagtctgtgatagccatgagcacctgaagcctggggtccatggttccctgaacctgttacaatctctgccaggcagagaatgcactgaccagctcccagagtggatagggacccaggtgtccctgagccatcccaggtgccagagcgtgacctagctctgaatggagacacaggtttcttctggactgacccaggactggcaggagcaggatcagaagggccaccttaacctgctcactcctcctctgtaccagccaaatgtccacagccaggccaagtgtctagatttgctcagcctgacctctcgacacatgttagcacaagtggtttcccacccgtctttgttgttgtttagcatctgttgagggctaagtgctggggtgaatgcctcgcctatatcactcaaccttctcagcctatctatgaagccgggtttttgtttgtttgtttgttttgttttgttttttgtttttttgagatggagtttcattcttgtcacccaggctggagtgcagtggtgcaatctcggctcactgcaacctctgcctcccaggttcaagcgattctcccgcctcagcctcccaagtagctgagattacaggctatgccaccacactcagctaatttttgtatttttagtagagatgaggtttcaccatgttggccaggctggtctcaaactcctgacctcaggtgatctgcccgccttggcctcccaaagtgatgggattacaagtgtgagccaccatgcctggccgaagcaggtattttatcatgactctgcagacaaggaaataaaggctcagaaagattatgtcatatgcctaagatcacacagcaggacagtgatgggacagaatcagaactcgggactgtcagcctcagggcacactcccctagaccagcacccaagtcagactatgcccagccaaccctggacatccagggctcaccccatggggtccaccacatctctgggaaagctgcatgatgggctgcctggaggcagtggccaggccagaataacccatgccagcattcttccatctcactcttcccgagaccagcctccagccctgaccctggggtaccctgctgccttagccctttcccatcctggaattagcaccaccaacccaaggggcaatatgttgattccagaacaggcagatgtgctgatgaagagagaggcagctgctaggactctcctacctgtcactgggccaggtgtggaaggaggggcaggagccaggggaaagcagagaagcaggggattacacgacagagcctttgcaggggcgagggttacatatccggactaggagctccccagagcccactgtctgtcccatccacccaggtgctcatgctcccaacttgttagtgccaactcctggccatgggacagcaaaacctcagacaacatctactcatccctcaaccaacccacgtcaaatcttgcctgggcccagcccaatctcttctacggcctcctgcctcatctccttccctcaccccctgccgttcagctaacttcctaaaacaaaggtggcaattgtgccattcccttccttccaacctactgtgcctatccatcacctggctgggcgaacccttccacctttctctacccacatgtccactacccacacctctccagtcaccccatctctccaggctcttgctcttgcagttttcttggccaagtaagtggcccttcccaacagagcaaaattctacttacatgagaaggcccagctaccccttccccgaggctccccagcagactcatggcagcatccctgaacccacagctcaaagttctgtggacatcaagcaccgtgtcttgttggagaaccacttgtgtggggttgacttcccagcctcacagagcttcctgagggcagggctaggtctgattcatctctggagtataggtgtagagcagaacctggcacagagagggaaccagcacaccctgttttaactgactgcccagtgagcctggtcagcagacattgggtaggccgtagggcttgtccacttgagctttccaggcaaaaaaaactgtcagagctggggattcgtgcttagtttggcaaggctcagtattagaggctgaagaacccttggcagaactgccagcccatccagttgcggcagtgccaccccacagcatagcaagaggctacattggcaagccctgactcaccataggttgtaagaacagccagacgcccatggggtgctagtgatgctgggttcatctatgactgcagtactctggacattctgagctgctcatctggttccactagatccccaggccctctcccaactaggcggtttgaggtctaaggaaatgccatatcccctgggtatggagcttggaatcttacctcttcagccattctgctgacccctaaccctgcccttttagccctcaagggcctacaactaccgcaggagagctgaggggtggaaagcacagaaacagcatgacataagcccaaagagtggccagaatctgaatggcttgggctgatagcactggccccaaatggagatggaaagagggatgacaacaagaggaagcagcggaccaaagtctggcagaagctagggactcatagtggtatcatccactgtatttgaaaatccttgagtagccgtgggcaaggagaactagactcagacaagtagaaagcccgcaaatggattcccggggcagaagtccaggctaaatctggaaggcgcttcaagctcacaggggaggggtctgcagggccagctggaggattttcctaccctttcctcagcaaccaaaactaccctccccaaagaagccctggcccactaggtccatccatggggcagaaccccatggaggctccttaccatgcagggttgtcctagtggacagcgatggagcagagtttgggggagatgctgcagctctggtgagaagccacccagtctcaccatagggctccacatggaacttgtagggatggggggtgagccggcactcactgccaccccagccaactgccctgagtacccggcaaagcccagcagcatcagcagcagtaacagagtcaggtccagtagtaacagtaacaggtccgacatggctctggacccctgcaccgcaccccaaggcagctgcaacagagaaagaagggagaggaggctggtagccatctccaacaatgtgcccacctgaccaccaaccagttctgcccccagctcctcagccctgccttgggtgctttgacccaggaggtggaggggccagaggtgtcagcacatagtgacctagaagagagctataaaggatgactgaagccacaagcctctttatttcttaatcacagtaggtgaggatctcagaacagctttacctgtcagctggcagccctggtcacacctggggaaactgagtcacagaggggcacagaagtgagtcatccagggacatactcctggcctggacaactctaccccaagatatggcagatgccagccagcctgcctttcttccacaataccatactccttgcctggacaagtctcccccaagatgtgccagatgccagccagcctgcctttcctccacaataccacttctttcccacagcagagccacactgccagtccagcctcctgaagcctcaggggctactgccagagggagggcagacgaataccagggtccacacacctatcaacaaacagggaaaccataaggaacaaaattccctggggggaaatgtgagacgggaagagaatttcataggaaactctcctttgctaagtacatctggcctgcagggaccttgctctccagcaagctcacccatccagaaccagagggaagaccacagcaaaatggcctgagcagctagaacaaagtccaccattaagcttcccagacttgaaccacccatgttaacaagcctcatcctaattttctaccccgaagaaacagtgaggagtgagaggaaaaggttgccagaaggggagtctcagaacaggaagcagtaacagttacgcatagaggaagggaagctgttcaagagcgggcccaggaacacaacacagaaccactgtgtgagctattccaggcaggctgcctaggtttccaggcagctcgggaccagaggcctaaccctcttacacagaggccttgacctgagttgcctggagaggggggaattgtagcccagagaatactgtttaaagaggaagggaagcatgtgacccactgggggaacattcccaccccaattatttaaaactaatacttaacatttaaaaggttttgaagctgaaaaggccacactgcagctttgtggaaaacttagctctgtggaaatatttgttccctgtaggttctgggtgttgattttacatttaaaaaaattatttttggagtcaatgaacacacagtatttgctcacaaagaggcaaagtaaatttctttctttttttttctttttttttttgagatggagttttgctctagttgcccaggctggagtgcagtggtgcgatcttggctcactgcaacctccacctccctggttcaagcaattctcatacctcagcctcctgagcagctgggactacaggcacttgccaccacacccggctaatttttgtatttttcgtagagatgggtttcaccatgttggccaagctagtctcgaactcctgacctcaggtgatctgcccgcctcagcctcccaaagtgctgggattacaggcgtgagtcaccgggcccggcaaaggtaaagtaaatttctaaacttttggtgtcaggacacagaggtgctgcccactggtctcagccatctgtgctcctacccatcagtatctctctctcttttctgcctgtcctactcatcttgtctccagttagtttcattcctgttgtctttgatgataatgataagaaatcttccaccgagcacttactatacgccaggcactaagtgtcgaaacacagctgcttcattcatcctcaaagcaatccgacaagacaggtatggctaagggcgcaagaggttagaggttaagagacttgcacaaggtcacacaggtattaaacagagccacgtggaccaaaatgcaggcaacatgaacccaaacactcagactccaggcccccatttccacttcctctctcctctctggtgactggcttccagaaagactcaagaatttaatctttgttggacatctctgagcccaaagctgcaaaactcttagcatctaggccccccacttgccatgggaatgacaagccctcactctgatctgccatctcagctgagcacttcctgtcccctgaagggaacttagtatccacctttctcttcttctcacctcccaaactgttcagaaaggggaaaaatgcacctgcaggccccagggctttggtcagcacggggaggggtaatgtaaatttcccctgtattcaagagaaaaggggccgggcatggtggctcaggactgtaatcccagcactttgggaggccaaggcgggcagatcaccagaggttgggagttcaaaaccagcttggccaacatggtgaaacccggtctttactaaaaatacaaaaattagccgggtgtgctggcgcgcgcctgtaatcccagctactcgggaggctgaggcaggagaatcgcttgaacccccagaaggcggaggctgcagtgagccgagatctcgccgctgcactccagcctgggggacaaagtgagactccatctcaaaaaaataaaaagaaaaagaaaagagaaaaggaagacgggctgggagcttgcctgaaactccaggcttacgttagttaactcatggcctccagtgtggccggtacgagtgcttcaatgccgggagctgaaaaggaacagtcactccggaacaggaaataacctctgagccgagcaccacgccctgactcccttcttcagggaaagccccccggggcctctgaagcaccctcgccccactctcaacccccttgggggaaatcagaagccaaacctagattcacagtgtcagggatcttccctagagtctgggtcacgcccctcttcctggagggcttcaggcacacctggcgcccaggaactgccgccgaccgggctgcgccctctctcaagcctgggtgtcccctccgctcagaggtcggcgcgggcgagcgtcagggaaggctgtccccgcgggcttcctgctgccgaccccgtgcgcggggcccggaggccgggtcctttagggtccccgccgcaggctaaacttcagtgctggaggtgcaggggccaccgcctcgcgcggtcggattccagcccctgctcaccctgtcctcgcctgttaacttacagcttttcttgtctcccacctccttgccgagtcccgcacatctgtaacttcagcgacgctgaagtttgcagcccgcgtgagaggcgcggccctgggggacagggcagagttaaaacgcgactcgggcctccctccccagctccactgccccgggcgtgccctgagcctgcggccttggcagtgggcccggaagggtgggtgctgccccaaggtcgcatccaggccctcggaccctgccggggccagtagtgggcaagacgagactccaagagcggccgggccgctggggtcactggggatagtcctgaggtcttgccgggtaggatgggggtcccagacccacgctccagcggggacgccccgactccagcccggccccggctccggaccggccgggtctccgacaccgtccgccacgcacgccgatccgccccctctctggcagaactgggccctgggcgtggccgtggccgtgggcgtggctctacccatggcctgagcgcgcgggacccggagggctgatgcctccccgccccgtctccacagcaacgggcgtgtgcggggacccagagctggctggggtggaaaccgcggcctactttcccgcctccagcaaactctgcaattgctgaggttgatttagcagcacccaagggatctgggtcggcaagagcacctcagtgacagcctggcaccggggtccgcaggagaaggccaggctggggccagggagctgaggctgaggaggagcgtttgcacaggctagggagacacggcacagcagtatccgcctcagacatttgtagcaccgttagtcctgccactttctctcactgtagcttcgcaacagacttgggaaccaagcaaggcatggctgaggaagcttaagcccagtctgggctcgcggaagaagctggtggatccaaatatctgcttcctgcctccacccacccctccccgctccgtgagcacattcatccatccaacatttatgatcactccctgccagggcaattctaggggctggggatacagtgaacaagaccaaggctccgccctcctggagtccacatcccagggacatgcccttcttccaggctcctccctcagtgccctggtggtggctgggggaggctggtctgcctttctggttagcgatagcttaggtgactcccaggtcaagtgtaagctccttgatgatggcaggaaactggtggtggaaacagtcagtaatcatggggtggttcaccttgtggatcccactactgcattagcaaagagcaggctgggcacacaggggcagtcatcatcccgcttcctttctctctgcttcacgttcttccttccgcaggcaggggagatggaacctggtccacagggccaagcctgtcccagccctccaggcagaccggcggaataggtagctggcccctcacaggcactgcgatccgggtcagtgcagatcgcggcagttattttacctatgaacgcccagcacaccgtcaaacgctcagctcaggtgccccaggcgggcaggcttttcacttgggagcatttcctttgacacaaaggggaccatggcactggctcagagactaacagcctctgcctgcagggtctgctggtcagttctcctgcttctcaggaggtggtcaacttttcccaggaagccattgtaaggaggcgcccattcttcatcttgtcctctctgctcacttcctttagcgtggttggggaactccagagccccacatcacagttcagcacgtgcctcaggagcttcagcacctccttcgtgaaaggagagtctgccggtaacgggggaagcaggccatcagcctgcccagcttcatctcaggccgcttccaacagcgccaagcaaactcccttggcaagatccatgcaaggccgcggctgaccaccgggaggcagcagcctactctgcaaggcactctctttacccgacccccacccccttttaacaggtggcaggaaacctgctggcccagccatctgccgcacccacccttcactcccagtcccatctccccatagcacagatttccctatcatgagcccagacgtggcctgcatctcctcttgccttcctctgcccaaggaatccctacagagattctttctctatcttcctttatacatttccacagaattgtttccccagggcccctccccttgaagaaattagacaggaagctggagtagatggttccctctttcccacctctcacactcccaagctctggttaactctctgtgggccagtggctagattccccaacacagatgacaactgaacaatacacatgcagcgtaagaatgttgtcgctgccaccagccacttacagatacaccattgctaaggtccacccaactggactgtttcccccttccatagactaagccccaaaggccaaaaataaaaccccctaccccaaacctgcctataactgtttgaccagaggccagctgtcccaggatgcggttaagatgtctaccttgcacaacagaactggcaagaaaaacatctccaggaagcggtcagatacacggcacaaaggactcccccctccccgcttttccttttccttcaccctgacccagttctacgccctgtaagacgttgctccagcctataagtggggctgcctcctctgcttttgtcaagagatagcccggcaggactgacaataaatcagtttgcctgaacttgggtctattggcctcattcctttcttggctgtccttccaattatcccttacaaccatctcccaccctctgaaggcactgcacccaatccccagccgttcgcagtctggtcagggctgtctgtgcaggacttgtcatggctgaggcccacatagcctcaagccactctgaagtcagcttgctgtttcccctggagcctggaaatacatccctcttcaggtaaacaaaagcagaaaaagcccagtgaaccccactgtaacaaagaaactgccagcaatcttccttctgttcctgcctgtctcaccacccaaggactatcgcagagcccactgtgttctaagatctattcttttcactaccacccagccaacccggtgtccagaccattccttgatcaaataacactgtcttctggagttttaattttatcttacaaaaagtgaaataaggaaaactgataggcaattatactgacttacaatttttctgtttgctttttttttttaagcaacatgaaacgccagtaaaaataaatatgtcacagaaacagccacttgtccagtctctggggcaagaactccagccctgctgagagaagggaagcccaccatcaccccagcagctggatcgccaagccacagatgctcctcaaagccaggcacaggtcccaggcctcaggggcatcctgaggaaagaagatggaaaaccaaagccagttgcccagaccctggggccacctcatcaacccccactcctcctggcagccgtctggccttagtggttaatcatttgcggcatctccgcctttgcccacctggaccctctttccctgacctctctgaagagggcacaaggaaaaaacctgtcttgggcaggctggggggattcttccagtgagtccccagcccaccctgagtaacacaaccagctaacagtcattttacacccaggtgcacatgagcacagcacacacataactctctctctctctcacacacacacacacacacacacacacacacacacacacacagctggactgagctgtcttccaggaagggtcttgggtctggtcacagtatgaggtcctctctcttctgaatatcatctcaatagtggtggcagagagaacccaaacctccccaagcccctgcattgcagactctgtagccggcctggctacccctccccagcacacaggattactatgtccaatagacctgcaaaagggaaaggagcacactcaggacccggaagagcaaagaaggtggacactgtctgctcaggacactcttcgttgtaagactcgggtataaataaaaggcccagggccaagctagtggcacagaacagacattaaggggttcaccatggaatacacagggcagaagagaagacttggcagcagggaaatggagtctgaaggtgaccaatggagagcacagcattctcagtgcttgagatgcagattccagggagcagtcagcagagggccagaacatcttgtggggatccttttggggagagatgacttctcttaggagttttggtggggaagagccactgagctcggtgcacagaaggccacggtttacagggagacactggtcttctgagaaatcaaaaaagaaagtgggaagcaggaagttatatccagaacactagtataaaggaatgaaaagcccccagagaccttcccccatgggatgaggactcaattgcaaagcaataccaggcttgaattgactgacacagagggcctttctctgctgacagctttgggagtgatggtcccacccaggccgcttaagtctggctaagtgtttcaaccagtctgcacaactttaacccagctctttgctgtttgctgctggattgggaaatttcatatttagcagtgaatcacaagtatacagagtctccacacactaattcctagagaagagaactctgaataaaggaggagaacacccctcatattgtcttatgcccaatttctgcctccaaagaaagaagaagtaaaaactaaaaggcagaaatgaaatccacaagcagacagcccagcgccacaccctgggcctggtagttaaagatcgacccctgacctaatcggttactagtggtgcatgcagcccccagtcatgtaccccctccttgctcaatcaatcacgaccatctcacacgcacccccttagagttgtgagcccttaaaagggacaggaattctcattcagggagctcagctcttgagacaggagccttgccgatgctcccagccaaataaaccgcatccctctttaactcggtgtctgaagggttttgtctgtggcttgtcctgttacacaagcaccagatagaattatccctaaatcaagagatgatgagatagacgcttaagaagcataactcagggccaagtgcagtggctcacacctgtaatcccagactttgggaggccaagttgggcagatcatgaggtcgagagatcaagaccattctggccaacatggtgaaaccccgtccgtactaaaaatacaaaaattagccaggtgtggtggcaggcgcctgtaatcccagctactcaggaggctgagacaggagaattgcttgaatttgtggaggttgcagtgagctgagatcacaccactacactccagtctgggcgagagagtgagactttgtctctaagaaaaaaagccccaaattccatatgcctgcccttaaagttattcccaaattacctctaacctttaagatatgtctcactttctccaagataataaaagatgtgggtgaaggaaaagaaaaacccaatcaatcaaataggtgaagaagcagacataaacaggcagaagggaaatggcagcaacataaaataagccagaggcaaagtatcccccaaaccagaggagccttggggcatgcacagctggagagagcaagtcagagagggatcttggcactgcctcaccttccacttgtccagtgtggggagcactaccccattggaacggttaaggtcagacaccaggacattcagaatgtcctgaatctacaggaggtgaaaagggtagaacaagggcagggggagaaagacagaagtggcttagagagaggcaagagagtcagaggaggaggaagaggtagctttagggaaacgaaatgctgaagaagagcaaaggagatcaagaccatggtctggccttcaaaatggctgcctgctgccttgccaggggcagaaacaaatagatggagaagtcccctgagcgatgcagtcacacagggtggagtcacctgaccgatgccactctgaatactctcattggatccctctcctcaggcccaggatgtggggatgaatctggcagagcaccagacctccacttccattttaaaaaccagacttttgagtaagggttcacttgaacaaaggggactcccgcaaaaaaaacaagtttgaacacactgatcttatccaatgtcatcttacagaggaggtaactgaggcccaggggaagaagtgacttttctgtggtcacccagcacgctggcggcaaagatgagattaaaagttagatcttctcctaatcttagtgcctggggctctcctcaccacatcctggggccctttcggtgactccaaaaaagacagcctgatggcaagtggctgttctcattggcctggcttccccttgagactggggatgaggaaaatgaaacagcaactgtcatttcctgggtgccttgggtgtttatggcaggccctgtacttggcattaacctaaaaacaacaataacaaatctcatttaagcttcacaagtgtaagtcaaacaataccacccctattttacagatgtgaaaagagaggcccaaagagatcaagtaatttgccctacatcatatccttagcagctggagaggtaggattaaaacacagaattcttaaccaggacccaacagttcttccacaatctaaacaactaccctctactgcccttgggccccctgtccccaggagcctggccagccaagactcacatccccaggtgagtggcaaccaccagaagtggttgtctcagggttactgccattttaaattttctctttcgctcctctaggaacaccaaggctgttcctccactgatagtttcttatctgtggaaaagaagagcaggaattctcatgagaagtccctgcagtcgcatctgactttacagtttttactgaggcaaaaatttaaaaataataataagtactacgtttatttacttcaagaaaagtaaaagctaaggcccagaatgtggcaaggcaagggttaaaaaaaaaaaagaacaagttttcctctacctagcaagctcacttcaaggacagttataatactgtccaaatagccaaggccagaggaatgggctccagacaccccatcccttccagagcaaggttaaaaaaaatatatatatattttactgttactcttttcccaggcttcttaagcattattatgttttacaaatgtctatatttatccaggtcttgtttttctttcaatgcagctacaaggtcaccaactatacaaggtcacaacttatgctatagattacatgacctatgactgtataattaactgcttttgttttgcttctgtaaggctgcttacaaaaaccccactctgactttgttcaatgttcagctttttaaatataaatccactgagccggtgcgtacctaaaataaacaacaatcctcctgtactccatattggtctctccgttcctcagtttaccacatttttggcagccatgaagggaccggagactgcaggctgactgtctcctttgcctctggggtctggagccctgggccaggggaaacctgtgaccccaggtgccaccagaaaatcttcagcccggaggggaaatcagctttcccctgacctggttccccctacgcagcagcacgacaaaacctgaaaagaactacaggacaatttcagaaacagagcacttcaggaaccacagtaaggttttgggggcccaaggcaggacccgcccatagggacagaaagaaagctaatcgcctcccggggtgtgccaaatagtccgacccagaggggctgggggcaacaggagtggctcaattcagataaaactcacaccccagctgacacaggacacgaaagtagctcactaagtcagctagaaaactgacgagagtggcttaccaccccaactacaaaactagaggtggcaaaagtggctcgccaccccaactgcaaaactagaggtagcaaaagtggcttgccaccccaggtacaaacatgagaactaaaagtatataaaagtgtgtaaatggagggacctaattaggctcatcagtcgcaaaataagaaatcacaaatctcttaacgtaaactgtatgctccaagaaaattgtggggcaaactgagactaataacaatctacatatgactaataggagctgccctacaactccaagttataacaaaaataaaaaactctccaaagccaagcagcgtctgaaaactcctgtaataggagacagcatatagtcggccaaaatgagaagaaaaataactgtacaaaagtaaatgtgcagcatcataactgggagaaaatgggaaaaaactcatcaaaacctagtcccttaaaatatatatttaaaaacttaaaagttttacagaaaattataaagttaagttaaccccccaaaagttaaaaactctctgtaaattaaaataaccctcttttagtattaaatagccaaccaaaggaactgtaaactaaaaaacaattagccatatatttaaggtggtgacaggggtcagaggacagccagggcacccagaccaaattcttttaaattgactcatggttaaatataatataaacaaaaccgacataaatccagccctgtttaatggcttattacaaaaagccaaaaataaaaataaaaacagcttcgccggcagacacagagttaaaggaaaagtcccagaaaaagcaaaagaagctagtttataggagccaccagagggaacaaaaattctccttccatatgtcccagcctacccccctttaccgaggccaacagctccagctctccagaaaccagattcaggagccagcatgctccaagtctcaccccaaagggaaagactggagcctcaagaggctaaggaaggaagtcaaaatagtcaagcaggccgtcccaaatctggttgtgctcgagctatacaaatgcctctcagggagatacgaagacccatctattataatgaccagggccacatcccagtggcgggggggcaacggactttcttctatcagcccttttcaaccactcatctactaaactgaaaacaccacacaccctcctacacggagaagccccaagctcttataaatctgatgcattccatctttctgacacataatctaacctggccaaattgcaggcagcttttcctaacgttgtttaacattaaagagtgccagagaatgacataagcagctctccgctagctagaagcccatgcactagcagaagcagtgaatgctcaagcacatgctcaaggctggttcccagaagcagaccccaatcaggacccagcttcagcgcctgcagaggtacaaagaggtcgcttttacaggggtaaagagctggtaaaaagagaacaattaatataaggaaaatttcaaaagtgcttcagagagctaacgagagcccaagttagttttataaaagactctgtaaaacattctggctttacaccccatttgaccctaaggctgccaaaaatcagcacgtggtgaacacagcatttgtcaggcaagcccagggtaacatcaagcagaagctgcagacatgaatgccacccaacttataaaagtggccaccaaggtatatgttaactgtaaccaaggaacaaaatgggaaagagcaaaagtaacaagctaggcacgccaagggttaagtccctctccccagcccagctctatctagaaaaagagggggcgggaaccagcgccaggagaagagcaaagaaaagaaaaaaataaaagtgtaaaaaaggaaaggaaaaagaaaaaaaaaattggaaaaaaatagaaaaaatagaaggcagtgcataggggcagcgcccgtgccgttgtccggccccaccagccagccgcaggagcaggagaactcaaaaagaaaaagaaaaatgtaaattaaaggcttaagaaaaaggccaatctgttggcaacagctcttataaaaagagaaattaacaatgtgagaggacgtggacgcgggcatagacatgaaagaggtcaagttaagcaaggattcgagagccagacaaggttaaaaaaaagatcaatgcgtgagatgcaaaaaaaaggacactaaaaaaaataaatgtccagaaggtaataaagagagtagtaaaggctgtggtataaaaaagtcaccagctaaaagctgtcacaccctaaaaaaaaaaaaaaaaaatactgatctaatccgggctggcaggggctaaaaaatataaagactagagacagactgagcaccttctcattaggcttccagaagcccacagtcacattacaagttaaaggcagcaggattctgccatatctggattccaatttctcactaatggctaagtcactatatgaagttacaaagtggggggaacccctcctctgggaaactaaacaggagaaagagccatgctttatgaaaacttgcttataaacttcataaaattgccccatgccagaggctatcggtacatgctagtgcttatttacaccttttcagggtgggttgaggctttccccaccaggacaaaaaaagcacaagaagtgactgaagtactgctaaaagactttatccccaagtttgaactccctctaactttaaagtcagacaatggccagcatttatagctaaaatagtgcaaaatttaacaaaactgttaaaaataaaatagaagttacacacagcctatcggccacaaagttcaggaaaagtggaacgcatgaaccagacactcaagcagctactaaaaaattattgccaggaaattaatctataataaaatcaggttttacctatgaacctcctctgagtcaggtacacccccaccgaacaaactgggtatttgccctataaaattttgttcggtcggccacccccaaatcacaaatcaaattaaaggtaatctccaagaactaggggaattaaccttcaaaaaaaaaatgcaggctttaaaaatagccatgcaagaagtccatgactgggtatgggaaaaaatgcctataagtctaacagacccagcacacccctttaaacctagtaactctgtttcagttaaaaagtaaaacccaacttctctaagacccatgtgggatgggccccatacagtaatcttgtccactgccactgctgttaaagttacaggaatcatgccttgaatccatcacaggcagctaaaaccggcagctcaggacaagtaaaccaaccagcaggacccagaacattcaacccggctaatcttgagacgagaccaagctgctgctgaggacaacaaccctgccctggtcactccggaggctgaccagtctacacacggctgaagcttgaggaaacaagccctgttctaatcacacattggaagctgactagtctacgcacggccaaagcttgaggactcgtcaagcaagtaaatgtaattaaaaatcttaaaactaatagtttttctgtaatactattttcctatttgttctgtcactgtgctcaacctcctcccccaagtaaagacctcctttgtccttactaaatataagtatgctgtacattgttttgctgttgttaccccccccttaaccatactaaaaaaaacacctatagaagggtgtccccactgtacacatactacttggtcagggaacagtacaactaaaaccctgttacactatatgtattataaatgtacagagactcgcttagaaacttgtacttacaatcagaccacctattcaattaataaccctggaaatggccagccttatatatgctataaccctaagtctttacctgggacttggtttaaaattcataccaagtcaaaggaaggaagtcttataagtggcgggggggctatatccatatactttaatatttgtcagttcacatccatgaacccaacctatttcacagtctctggtcctacagggtactatacaaactgccagtacaaaattatatatacaccccctgtttgtccctccaaggccctagcaatagtttgctggaactgcacaacgcagttcactgacggatcatcaccgaggccaaagcgaatcttgctcatcaaaataccagcaaaaccaaattgtaagacaaacacttacagtcctataaatcttactatcttaaagccagatatacctatatggactacaggttactccatgacattacgaagctacagtcaaaaagctaaaatagctttatacattataaagaggactcaaaccaagcagtcagcccagcagcaattccgagtctttacgtcattctttgaacatataaaccagaagttaccagagcctcctcctttaaccaaaaacctatttgctcagctggctgaaaacattgccagcagcctaggcatttcctcatgttatgtttgtaaagggactaacatgggaaaccaatggccttgggaagcaagagttaatgcctcaagataactttaactgactctttccccagactgatgcccacaagttcaagcgtctggctcttaaaaacttctattattaaaagatactgtattgctcattggggaaaagtttttacagacccagtaggagaactaacctgcttaaaacagcaatattataataaaacattaaacaaaactttgtagcagggcagagataactacaaaacaccccatccagacccattctcccgcttctcttctctaaaccacacttaatatccaaatacttagcaagtatttggaagtatttgcaagtatttggaagctccaaatacttggcaagcatcccctggtctttattagatctgtgggccatgggcatatcaacagttgctagctaaatgaacaggggcctgtgtgcttggaacaattagactgtctttcttcctactcccactgcaacagagagaaactttagggtatcttatctataataaagttgaaaaaatacagatataagaagaaatataaaaattaaaaattaaaaaggcacaaattggcaccctaaaaaaaaaattcaatactataggccagctacctggacacaaaataagtcataggcataccgcagtcctatttacatgcttaaccacatcataaggttgcaggcagtacttaaaatcatcactaataagacagcaaatgcattaagtttactaacccagcaaaccacaaaaataaaaaacgccatcagaacagattaactttagtctgccccctagcccacgaaggaggagtatgtaaaaaattcaatctaactaattgttgcctgaaaatcaaaaataataaaaaagcaattataaaaataactacaaaaataaaaaaattagcccacgttccagttcaaacttggaaagagtagtctccagattctctctttggaggctagttttcattttttggagggttcaaaactttaataggagtggttttagccacactaaaaagtttcctaatactcccttgtctgttacctctcattgttagaagtattcaatcaactatagaggcaatagtagctagaaaaatcaacactcagctaatagctctgcgtaaatatcaacctttgtgttaaaaaaaaacaaaacttgtctcttcaggcaaaactaagtaatagtaatgctttctattaaacttctttcataaaaatcatcaaacgggggaaactgaggcaaaaatttaaaaataataataagtactacatgtattcactccaagaaaagtaaaagctaaggcccagaatgtggcaaggcaggggtttaaaaaaaacaaagaaaagaacaagttttcctccacctagcaagctcatttcaaggacagttataaaataacgctgtccaaatagccaaggccaaaggaatgggctccaaacaccccatcccttccagagcaaggttaaaaaaacaaaaacaaacaaacaaacaaaaaaacacacacacaaaaaaccagattctttactgttactcttttcccatgcgtcctcacggcagaaggcagcctttctgttacatctaggaattgaacagaaagaggacagcccaagcctcatttcagagaggtctggtatactcttagaaatctatgagacggtcatccctaaatccattaatgttttttctctctgaagagaatcaagggaaactgatgcttcagaaagatgccccatattaccctgtgacactcaaagtcccccagattgagacatgaggaagattcaagctgtcaagttcagtttcccaagatctctttcatggtaaataagcaaatctcactccaggcagggtctgggctgttaaggggaggggctgactgacaagactttgatggggggagcccagtggcacttgggggcccagcccagtaagcctcgggagtggcatgagctctggccgcagtcctgccatcagagggattctggggctgggtgggggaggccatcacctggcgatagtacctttttctttgcagccgccaatttgctctgtagggtttcttcagacattgcagggcaggaaggaatgtggggttggggccacgtcagctagattgcggcttaccactggggaacaattcctgtcggccaccgcgcaactgtgcgactgaccagaggaggcgtaaccagggcctactacagcgcagaatagggggcgtggccgccatcctccaagtccattggtcgatgagaaagatgacagagaaaggaggcgaggccaggcagcagcgcgtccaggtgggtgtgaggcgtcacaaggaaagctgagcaggcaattgctgccccgcccactctgggaagaggggcggggccgcccgctccagagggacggaagcggcggggccgccggatccagggacaatggggtggggcgggctttccctgggtgggcgcagcggcttcctgggtccccctcacgctctgggtcagagttcctttacaggcggacctgagaggcaactcaccgactcctgccctggaccctcctgcgccactgaaccccctgacctgggagcctcggaacctagggctcaggaggtgggtgaggaacggactccacagtttctttcctgactcctcacagccctgccccagaccttcccttcccagaaatcacctccaaggacccctaatcaatgttccagacgcctacctctcggaacgccccattcctagagggtccctaccctgattccgggagcacatttgcccccctttccagctggatccagtcccgggctctcctgcttcccagctcctcctcccgcacccaacagcacccctttcctctcagagcggccgtgggtcccatcaggctttcccctcggatcctctgcagatgaaccaggacttatccgaaggtaccaagtgaacttctaggaaaagtccaattctcagatgctggatgtcttccaaaaatgaagcaaattagtaacttagtagctgagtcaactaatcctgttagatggtcaacactggtttttttattttaatatttttaagtggcaactctagtgtgtgagaaaattaatgtgacagctgaatttgtagaaagctgctttgactctcttgggccccttcataagccctggaactaaataaaagtctagtgaatacaggtaagctcccttctttttctccatatttacccctcacttcaactataatttcacaggtccctttttccacattcaaggtggttgataataaagtgggaatgtacaggattctctttaatcctgaattagcaatccaaaaattagaatttgttgcattcttagaactacggtcagggttcctgagcaggtactcaagcagacacaaagacaaaacttccattttatttcagaagaacctccataatcccatgcattaattcccatcataaatcatctcatctcatccatctatctttcatctatctatcatctatctgtcatctgttatctatcatataacgataattcatctatcatctatcattcatctgtctataatccatctatttatcatctatgtatcatatatcgatcattcatctatcatctatcatgtattgatcattcatctatctgtcatctatcattcatctatcatctatcattcatctatcacctatcatctatcatatatcgataattcatctatcatctatcatattcatctatcatctattattcatctgtcgatcatctatcattcatctatttatcatctatcatatattgataatctatcatctatcgtgtatcaatcatctattatctatcatctatctgtcatctatcatatattgatcatctatctatcacctatctatctatatatcatctatctatttattatctctctctctctctcctctattagtactgtttctttggagaacccctagtacatatactctttttcctggctctttgagtataaggtgatttgctagggttaagaatgtagcctcctggtaggctgcagcgagttgagatcgcaccactgcactccagcatgggtgaaagagcgagacttcatcaaaaaaacaacaaaaaaagaatgtagcctcctgtaaccactagctcattccttatttaaatggatcccccccaccctcccagagcgccacactttttgtccattgatcatttgtcttgatatacttgacaaatgtcattgtcatgcatgaaacacctccgtagccaatagtatgtgtattaaaaataacgcttcttcctcttccactcaaaagagaattctaatataatggttatatataaggaaaattttaaatctgagtttactttttaaattatattaaaacattcacaaagtgcaacactttattttttataacagattatttgcaagttacccttaccacaaaataggacagtccattgtgtcctatctaatgcaaagattaaaataaaagaaatatacttcagcaaaaagaactatagtcaatgaatgctgtttgtcaggaagatataagttcatataaggaagtttgtttctgattattttactctagggtgtaaaaactcctcaacaaaaatcagtttgtactggaatacagtctgtcatgtttaagtcatagcagctgagccaggactatattcttcactacatcaagtaggatgaaggagctccagaaatacttttgaagcaggaatttaaagtgcggataggatggctaccatttaagtgatatttaagtttctcccttatgaggcttgcaaggccctttggaatctgacttctacatccttcctttccaacatcatatctcatcatttccccttttccctcctctaacaacctccattcatccacatcatgcacttcagctattctgaacttccctcctgaaaccagccactcacagagcaacacttttcaaatcctggctctacctgtgtaacctgaggcaggtttccaaattctgtgtgtcccagtttcctcatcctcattcctaaatttggaacaataacactcaagtcatagggtcactgtaaagatcaaatgagattacaactactcatgtgaaattcttagcatagtacctttcatttaggatatgcccccaaaatactggttgttgttaacagtgttgatgtgtctgctcataacactcattcccctcctcacctccttttgtatacttagttcctacacatctttcaaacatcagcttaaataggaaaccttccccaaataactcctccctacctaggtgaatattcctcctgtttgtatgaccgtaatccctgcacatcccatatcaaaggacttaatgtcactttctgccatctcttgtatgttgttcatattttttcattatactgaaagctccttgaagacaagtgctacatgtattgggatctgcatttcatctctatcccctgtcataacacttgctacatattatgccttctatgtttgttgaaaaaaaatgaatgaatgaaactcagctggcaagggaaagttactttggctttcatttagatttggggttttttgttttattttcaacatagtcatgagctcttctgctaaaagataaaatctagacatattcaattttacagagtttaattaagcaaagaacaattcactaatggtgcagtccctgaaacagaatagattcagagagagtccaggactagatggtcaaagatttatggacagaaaaaaggaaaatatgcagaaaacagaagtgaagtacagaaacagtaggattggttccagcttggcgtttgccttacttaaacatgggttttcaaagttggctgccttggattggctgaaactcagtgattggtacaagagtaggtgacagcctgtttacatgtctaattaacttacatttcaccatgtacaaagaaacctttaggctgaacttaaaattgtaaaattgtttagctgtgggctaaacttaatgtcacatttctagatcgtgttcaattagctaaccataggcgtcacttctcttctaccctccaaaaccactaatgctgctgcaaaagagaacttccagcagctgtttacctggaaacaagttgaaaatgtatttgaaatggaagccactagaattgtaaacacttctgtcatctttctcctttgtgtgcctctgcagataaggctgctccagtgcccccaaatttggaccttatgctctgtagtttcctgttataaccaatttgctatttgtgttaccaaagtatatttagtagattttatttgaaaaaagaaataaagttagaaaatattgacagtattacataacataagttctttgtttaaatttgtcatatttaatttttgaaagctaaataactaaaatctcatttctactaaattattctttttttcatgctaaggctaaatgtgagagctaacattttacaaaattttgtgtttttctttcaaaatacatgacaaagcacaaaagcatttttatcaggattaaagtaatttatggaaaatctaactctacgactatgtaagtgatgatctagttatattacaatattatgttgttttaatatccattattattgtgtgttaagtgctttccttgtctctatcgtaaagttacatacatagtaagcaattataggtataatgcttacaactgtaatgatgaataataaataatgacatttgttaaaccccagatattcatttatttattcaggcaatatttattatgtatcagatactgtgctaagcaatgagtatatcatgatgaacaaagaaatgggactggactcttggaacaagatgaaaacattacaggaataagcctaaaacacatttatatagttataattataaatcacaataaaacctacaaagaaaaaaaagacactaaaagagatcatagcagagggaatctaatttagattggaatgccaggaaagtctttccaaggatatggtattgtaaattaagctaaaaagcatgaaaaccaattctacacaaactattccagaaaatacaagaggagggaacactgcatgaaaatcattcagtaaggccagcactctactgacacccaaaccagacaaagatactacaagaaagaaagcaaggaaaggaaactcccaataatattcctcataaaataggagacatagtattgaaattgatgtgaaaatcctcaagaaaatatgagcaagttgaattcaggtataaaaagaagataacatgctatgattaaatatatcaggaaatgtaaatctggttgaacattttaaaatcaatagatgtaatttatcgtattaacaggtgaaagcagaaaaccatataatcatcccacaggatgtagaaaaaatatttgacaaaatttaatatccactcatgataaaatctctcagcatagagggatagtggagaacttcctcaacttgatagtgagcatctctgaaatacttctagctaacttctcagttagtaaggaaagactggatgctttctctctgaatgcgagaacaaagcaaggatgtcctctctcacaacttatattcaagattttgcttgaggtccttgtcagtgcaataaaaggaaaaaaaaaatacaataaaggcatccagattggaataaatgaaataaaaacaaaattgtttttatttttagttagcatgattgcttgtggagaaaaatctcaaagaacttaacaaaaacttagtagaactaataagcaatactatctagagtgaaagaaacaaggtcaagtttattttgtaccctgtatttctgtatttctgttttatttctgtatggcagcaatgaacagttggaaattaaaattttaaaacagcatcaaaaacataaaatgcttagctataaatctaacaaaacatatacagattctgtgccaaaaactgtaaatgtctatttaaaaaatcaaagaagagctgaacagagagctacatcatgtctattgttggaaaattcaatagaattaagatacaaatttcctcaaagtgatctggatgcaacacaattccattcaaatccaagcagacatttccttttaaaatccacaagctgtttctaaattcacacgaaaattcataagaataaaaaagccaaaatacttctgaaagagaacaaatttagaagactcctactatctgacttcaggatttattataacacagtgtaattctggtgaaaagacagacatgtagattaatgaaatagaatagatactagaaatacagtaactatacacaggcaatttttcacaaaaatgcaaaatgcaattcaatagagaaagtataggtttttaacaaatggtgctggaacaattggacatctgtatataaaaaaaagagttttaattcataccttgtatcatataccaaaactaaaatagatcgtattcataaatataaaactataaaacacatagaggagaacctacaataaaaatctttgtgaccttaacttagacaaaaatttcttggacatgacaccaaaaatatgatccataaaattatgataaattagacattatcataatttaaaagtttttgtccaaaagatactgttagaataaaaacacaaaccagaaacttggagaaaacatttgcaaaacacaaatctaataaagggcttgtatccaggttatgtaaagacctcttgagctcaataataaggaaacaaataatttcataaaaatacataggcaacagatttgagtatagagttcaacaaagaagatataaggatggcaaaaaagctcataataagatgttgaacatcaggtgtcattggagaaattaaagccacaatgatataccattatattctattaaaagagcctaaatttaaaaaaaaatttttttaaatgacagcaccggccaggcgcagtggctcacacctgtaatcccagcactttgggagtccaaggcaggtggatcacctgaggtcaggagttcgagaccagcctagccaacatggtgaaaccctgtctctactaaaaatataaaaattagccaggtggggtggaagacatctgtaatcccagctactcaggaggctgaggcagaagaatctcttgaacctgggaggcggaggttgcagtgagtggagattacaccactgcactccagcctgggcaacaaagtgagactccatctcaaaaaaaaaaaaaaaaaaaaatgatgacagcaccaagttctgaccaggatatagtgcacctggaacactcatacattgctggtggaatacaaaatggaacagccattttgaaaaacattttagcagtttcttatacaattgtttattattagtagtagtagtattgggatagggtcttgctctgtcacacaggctggagtacagcggtgcgatcacagttgaatccagcctttacctcccgggctcaagcttcctcatgcctcagcctctggagtagctgagactacaggcacatgccaccacacccagctaagtttcttaaaaattaaacacactttagcataagacacagcaattttactgctaggtatttatcccggagaaatgaacatattatgtccgtatacaaacctataagcaaatatatacataatgagtttattcataatatcaaaaactggaaacaactcaaatgcctttcaactggtaaatagataaacaaattgtggtggatctgtgcaatgaaattatactcagaaataaaaagaactaccaatacccacaacaatctggatgaatctgaaatgtataacacttagtgaaagaaaccagattcaaaaatttatatacttgtttaatcacatttacgtgtcactctggaagagatcattgtttggcaagggctgggaatggagtgaggagttaattagaaatacacgcaaagtggcccggtgcgatggcttacgcctgtaatccagcactttgggaggtcgaggccggcagatcacttgaggttaggtgttcaagacagcctggctaacatggggaaagccagtctctactaaaagtacaaataattagccgggtgtgatggcgcacgcctgtagtcccagatactcgggaggctgaggcaggagaatcgcttgaacccgggaggcggaggttgcagtgagccgagatcacgccactgcactccagcctgggcaacagagcgagactctggctcaaaaaaaattaaaataaaaaaataaaaaaattagccaggtgcaatggtgcacacctgtggtcccaactacttggaaggctgaggtgagaagatcacatgagcccaggatgtcgacgctgcagtgagctctgattgttccactgcactctagcctgggctatagagcaagaccctgtcttaaagaaaaagagagagaaagaaagaaagaaaaaagatagaagaaaaagagggaaggaagggagggaaggagggaggggagggggaagaggagaggaggaggagaggggagagggagcagaggggaggggcggaaggaagggaaggaaatgaggcttggaaccagagccatggaactctgttcttgatggcggcatctccctcatcaagtcggggcgtccatctccctgctggctaaggaggctcccaccccagtggagggcaggactcacctctggcttcagtgtcaggaacatggttggctgcgagtagacggtgggaagatggatagatatttgctggcccaatgaaggagtgggggttgtgactaaacacgatgcctgatcctcttctggggctccagctggcacccggagctgaagagaaaggctttatgatgaaacttcccttctgccaaaaataaccagtgcaagctgggcatggtggcacaagtctatagtcccaactactcaggaggctgaggcaggaggactgtttaagcctgggagcttgaagccagtctaggcaacatagcaagactctgtctcttttcaattaaaaactattgcagcttcctcaatcttccccggcagcctggggtggggcgctctgcttttcagagctgcctccagaacttcatccttcctccttccctcctccaccctcctcttcttgtttccatcacagccccgccaccctcaagccacaccccattgatcatttgctaaagattttagtacctggctctggcctgctttccaccgtcaacactcacatcaaggcacctggatctcttctccgccggcaatcctgccttccgccttcaggtatggatgctgtcaggagagatctccatctgctcccaaggccaagtttcccaacaccctgcagcaaggtctgccctccctcctagcattgtagatgggcctgccagggccaggactaggatgaaacaggccagcaaggcacccagggcataaaggttaaagaggcactcatccccagggtcataccagtagagagtcggcacctgagaatgagtgcctcctcaattttacacttgcttgccttgctgtagtcccagctctgggacctaccttatgaacacaaggctctggtcccctcccacttcctcagggctgtctcttttgtggcatccctcccatcagctgcaaacagatcctgtgtaaataccaccatacaaagccggccttgacccactttgccctccagctattgctccattcttctgttcttttttctttctttctttcctttttttttttttttagggtttttttttttttttttagtttttgaccaggtcttgctctgtcacccgggcttcagtgcagtggcatgatcttggctcactgccgccttgacctcctgggtccaagtgatcctcccacctcagcctcccaagtagctgggactacaggtgtgtgccatcatgactggctaattttttattttttgtattttttttttttgtagagacggggtctccccattttgcccaggatggtccgaactcctgggctcaagcaatcctcctgcctccacctcccaaagtgctaggattataggtgtgaaccaccatgactggcccttctttttttttttttttttttttttttgagacggagtctcgctctgtcgcccaggctggagtgcagtggcgggatctcggctcactgcaagctccgcctcccgggttcacgccattctcctgcctcagcctcccgagtagctgggactacaggcgcccgccactacgcccggctaattttttgtatttttagtagagacggggtttcaccgttttagccgggatggtctcgatctcctgacctcgtgatccgcccgcctcggcctcccaaagtgctgggattacaggcgtgagccaccgcgcccggccatgactggcccttctgttcttatttctagcaaagctaaagtcatccacctttgacgtctctactttctctccttccagtctccccaagaagttgctcttgacctccacccaacagcacagcctgttgttgattcagtgtctcccatccaacatggctgtggccccagccatcctcccagcctcctgccttggtagatgctatctctgcccttagttctcatgccctaattaatagccgggctgtgggtgctaagaggtacccagctcctcctagctcagaatccagtgacaaatcttctttatgttaacagggcaactccttccaaatccctgggctgctgtgtatgactgctggggtgaacgtcgccatgtactctaccccttactgtgctatcgttcagaggtcttgtcattgatgatgattaaggaaatcataaaaatgttaaacgaaggccaggcattgtggctcacgcctgtaatcccagcactttgggaggctgaggcagaaggatcacttgagcccagagctcaagaccagcctgggtaacatagtaagaacctgtctctacagatttttttttttttttttttcagctgggctggtggtgcatgcctgtagttccagctactcaggagtctgaggtgggaggattacctgagcccaggaagtcaaggctgcagtgagccatgatcctgccactgcactccagcctgggtaataaaaaccagcctgtttcaaaaacccaaacaaataacaaacaaaaaaaatgcaaaatgaagaaagagtcgtctcaggagcacgttcctctgtgtgtgtgaggaaatgttacatatatagtatatgtagagcgacagagactcacagagagagagaacgagtctaaagcagaagctaaaagcccaaggaaccaaatgcaatgagatgccactaaatacccattaaaaataaatcagtcagtcatgatggctcacacctgtaatcctagcaatttgggaggctcaggcaagaggatcacttgagcccaggagttcaagactagcctgggcaacataatgagatcccatctctacaaaattttttaaagtgcctgcagtcctagctactcaggaggctgacgtggaaggattcctttgagcccagaagtttaaggttacagcgggctctgatcgtgccactgcactctagccttggtgacagagccagatcccaattctagaaaaaaacgaaaactgaaaaagtcagatttaaggcccacaagagcaaatgttggtgaggataggaagcatctggaaccttcataggtggctgatggggatgcaaaaatcatacagtcattttggaaaatagttagacttttttttaaaaaattctacttatttattggctagtgtagatctttatttatttgtttgttttgagacagagtctgctctgtagcccaggctggagtgcagtggcgccatcttggctcactccaacctccgcctcccaggttgaagcgattcttgtgcctcagcctcccaagaagctgagattacaggcatgtgctaccacgcccagctaatttttgtatttttagtagagacagggttttgccatgttggccaggctggtctcaaactcctcgtctcaagctgtctgcctacctcggcctctcaaagtgctgggactacaggcgtgagccaccctacctggcctagtgtagatctttaaatacgaggtattttctttaaaagttaaacacacactcgccacatcacccagcaatggtgccatgtggtgaatatccattcaggtatctaggtatctgcgccaaagaaacgaaagactgtctgaaaatgttcaaggcagctttataaaaatacccaaagaatggaaatcactcaaatgtgcatcaactgatggatggaaaaaatgggagtatattggccaggcacagtggcttacatctataatcccagaattctgggaggctgaggcaggaggattgtttaagcccaggagttcaagaccagcctcagcaacatagcaagaccctgtctctaaagaaaaggaaagatggtctggaataccactcagtgataaaagaaaagaactactgggctgagcgcggtggctcatgcctgtaatcccagcaatttgggaggccggggggtgcggatcacctgaggtcaggagttcgaaaccagcctggccaacatggcgaaactccatctctactaaaaatacaaaaattagccagtgcgctggtgggtgcctggaatcccagctactctggaggctaaggcaggagaactgcttgaacccgggaggtggaggtggaggttgcagtgagctgagatcacgccattgcactccagcctgagtgacagagtaagactacacctcaaaaaaaaaaaaaaaaaaaaagaaaaaaagaactgaactactggttgaatctcaataacacgattgacagagccaatcacaaattattttatttatataattactattattatattaatttataatttatattatttcatttatattctagaaaagggaaactatagcaacgaaaagcaatttggtggttgcctagaagtgtgggtcaggacaatgactcactgcaaaagggtgtgcgggaatttttggagtgatagaaacattctaaaacttctcgtgatggtgtttgcatgtcttatacatttactcaaagtgatcaaactgtacacttaaaatgggtgagtttaggctgagcatggtggctcacgcctgcctgtaatcccaccagtttgggaggtcaagatgggaggatcgattgattccaaaagttggagaccagctgggcaacatagtgagtcttcgtccctacaaaagaaaaattttttaaagttagccagccatggtggtgtgcgcctgtggtcccagctagttgggaggctgaagtgagggatgacttgagtccaggaggtggaggctgaagtgagctgtgatcgtgccactgcattccagcctgggtgacagaataagacttcgtctcaaaaaaaaaagggggggtagggggtaagtttaattgtaagttattttaccataaagctgttaaaaaataactattaagtctaaacagtaatcctggaaacccactttgggaacagagacatgcatgcagcctgtgctcaaaaaatgctttcagactgtcggggaaacattatgcaccagtcagtgtccactaaaaggaaagcctcttccctccctcaagttcgagtcagcccaggcttaatgttatccttgtctgccacctggtggtcaaaatgggccatgtcggtgtcctggtctttcaccccaaactccatgaggctctgtggttgggctgaaaagccgtggatggaaagaaggggaactttacccctggaaaactggttccctgagaggcaagttggtcagaggtacgggcataaggggattactaggggtctatgggacaggaatacagcctcttaatgacagagaaaatactttggtgcaaccaagaggccgattgaacacaactcacccacctttgcacactgagataaaatatgggaaggttttttgcaaagaggggaaggagaaaagtttagggacaacaatgagctaagtaggaaaggtagtcatgtggacaccgatggtgagttcggggatgctcagaagattgacaggttagcaggggattctgaaaggcatggatgggacacttcaagatatgttgtttcaattgataaagatgcataaacctaacattgtgcttattggctacttaaatattggtgacatactgcttcctcaataataaggattatagcaaacttaattatagtttcctaaaaccttttatctggtggaaatttctattaattatcaagaggccttaaaataaacttcaatacacataaacccttgtattcattttaaatctatccaacctacaaaaacagaagagcatattggccacaattcaaggccatgttacattggaaaaacattctctatcatgtggcctggcacaagggttggcagcaacagagcagacagaaccaaaggaagaagggcctgaaaaacccgctagtgcatttgggctggcattttgttacaggaggttctgatccaattttaaattctgtattgcagtctagtgaggcagcgagagttcattatcccaaccgcaacctacagtctaccaggagacatgcgacccaccagctggtatttgaaacaatatagtttagtgcctaactgctcaaagtgtggtccctggctggggagcatcagcatctcctgggagcttgttagaaatgcagaatttcaagcctttcgtggatgttatttgttagctagcctacaaaacatatgataataattcataaacatgcactaaagtgaaaaataaacactcacctacacacaggcacacacacaaacatagggcttgctaatactaactgcaaaatgttttatccaataaatgatgataaccaatttgttttcaaaatgagaatgtaggatttgggtacccatttctgtgtaactaaaaataacaaaattcgatggcttaaaataattatttaacatgaatcatttctacaggttaaaaatatggaaaggccttggctcagtgattctgcacgcagtcaaatagtatctgggactggaatcacctgcagtctcactcattgacatggccgaagtggcacctgcagcctctctctctatccttatgtgatttttccatatgggctttccagcatggagtcctcagggtagccagactttttatatggcagggaaggtggtcttctcattctatcagaaatgaaagtgatatttttggcctctctcatttctcttctatttttcaacttgtttaggacctgggcaggaaatacagctgctatttgctagactagtgccttatagtctcaacactttacaatgacttttctttcattcccatggtatcttcccacttggggccctgcgttgcttggtgccctagtacacccatactcttatctccccagcccctttggggcgtcagtctgcagacttactccacctgccccccactccactagaggacccaacagcaaccctgtggcttctgtcacgcccttggctatctgctcatctcctgctaacactccaaatcctgagtattaggcagcactaggagattgcttcattgcctaggactccaaaaggggaagtcctggattgatgtggagcagcctataaagtttcccaggggatgtgaggtgagagaatcaacaaggagtggttgagacataagtataatgaggagagaagagcatgcccctcctcatccccacccacctgtagttccaaaagaaggaaaccttttttctttatctcttgaaagaagacaaagttgtccaatttaatgacatcacgtatataacagtgaaatgtcacaatattctttgtgctgcaacagtatcaataactagtgaagccatatgaccaaccaccatcacaggaagccatcagtgcctttcaaacaatgttttcatgctatgcttgaggccaaagagcaggaacctcggggagaggtagagggagtgaaatgtatccaaacctgtgaagatactacagccaacctcagcctaaaaacacacaggtgatactctgcctgccagataccaggtttctcagagctgggagagtaggtgagggctgtgagacccttaactctgactcaggagcagaggaatacatctctggttttcacagcatcagtgacaatttcctgagcagtggtgggcctggctgcagaaaacgggagccgcacacctcacgcacacacaacagtgcacaacagtctgcctggggcagaagaatgcagcgacctgtgctcccaaccacacaaatccctgaaggtactgctggtgcccagctgtcattcaaggcaatagacacactagcagggacagaggcagcaaaacgagtttcctaggtgatggcagggcaggcagcctgaggcatatctcagccagctaggcacagaaggaaaaagctgaatgactctaaagagaaatcaccccttttgtactaaagggagagaattagaagggttacagctcagaatgaatcccatttacaatcgcatcaaaaagaataaaatacttatgaatatatttaaccaagtaagtaaaagaactgtacagtgaaaactataaaatattaattttaaaagatttaagaagacaaatggaaagatacactgtgtttatgacaaaatcatgacctttacagcaacatggatgcagttgggagccattatcctacatgagttaacacagaaacagaaaaccaaatatcccacattctcacttataagtgggagctaaacattgagtacacatggacataaacatgaaaacaatagacaatggagactccaaaaggcttaagcgagtgggatcaagggttgaaaaactacctgctgggtactatgttcactatttgagtgatgggataccaagcccaaacctcaacattatacaatatattcatgtaacaaacctgcacatgtgccccctgaatctaaacaagcaaacaaaaacaaaaccaataaatggtttatgttaaagagtaaaagaaattctgaggtacaaaaaaagaaaggatatactgagttcatggattggaagaattaatattgttaaatactaaccaaagtgatctacagagtcaatgcaatccctatcaaagttctaattgcatttttcacagaaatgtaaaaaaatcctaaaattcatatggaaccacaaagaccctgaatagctaaaacaatattgaaaaggaagaacaaagctggaggcatcacacttcctgatttcaaattataattcaaagctatagtaatcaaaacagtgtggcactagcataaatgtagacatatagaccaatagaacaaaatagagagcctggaaataatcccacctatagtaacaaatttttggcaaaggcaccaaaaatacccaataaggaaaggatagtcttttcaataaaaggtgggacaactggatatccatattcaaagaaatgatattggacctttatgttacgccatacacaaaaaccaattcaaaatggattaaagacaagtgtaagacctgaaaccattaaactccttgaagaaaacatgggaaaaactccatgacattggtcttggcaatgacttgttggttatcataccaaaatcacaggcaacaaaagcaaaaataaacaaatggaactgcatcaaactaaaaagtttctacacagcaaagaaaacaatcaacaaaatgaaaagacatatggaatgcaagaaatatgtgcgcatcctctatctgataagtagttaatatctaaactatcttaggaatacagctctatggcaatagaacaacccaattcaaaaatgagcaaaggacctgagtagacatattcccaaagaagacatacaaatggcaaacaggtatatgaaacgatgatcaatatcactaatcatcagagaaatgaaagtcaaaaccacaatgagatattacctcacacatgttaggttggctattaccaaaaagtcaaaagataagtgttgggaaggaaatggagaaaggggagcccttccacaccatcagtggcaatgtaaattggtgtagccattacagaaaacagcgtgaagaaaacagtagttttctcagaaaactaaaaatagaaataccgtaggatccagcaattccactattgggtatatacccaaaggaaattaaatcagtacgttgaagaaatgtctgcactcccatgctcattgtagcattatacacaataaccaagatatggaatcaacctaagtgtctggtgacagatgaataggatggtatgtatgtatacaatggaatattattccaccttaaaaagaaggagatcctgccagctgagacaacatggatgaacctgaaggacattatgctaagtgaaatagccagatgcagaaagacatgtactgcatgaactcacttacgtgtggtaaaaacagatattagaatgatggttattagggactaggggtgtgggaaatgagaagatgttagcctaagggcataaattttcagttataagataaataagttctagagacctaatgtacagcacgtttaatagtaatgcatacttgaaatttgctaagatagtagatcttaagtattatcaacacaaaaaggaaggcaaagttagaatggcggtcattaaaaagtcagaaaacaacagatgctggagaggatgtggagaaataggaacacttttacactgttggtgggagtgtaaattagttcaaccattgtggaagacagtgtggtgattcctcaaggatctagaactagaaataccatttgacccagcaatcccattactgggtatatacccaaaagattataaatcattcaactgtaaagacacatgcacacatatgtttattgtggcactattcacaatagcaaagacttggaaccaacccaaatgtccagcaataatagactggataaagaaaatgtggcacatatacaccatggaatactatgcagccattaaaaaggataagttaatgtcctttgcagagacatggatgaagctggaaaccatcattcttagcaaactatcacaagaacagaaaaccaaacaccgcatgttcttactcgtaaatgggagtttaacagtgaaaacacacggacacagggaggggaacatcacacaccagggcctgtcagggggtggggagctgggggtgggataccattaggaggaatacctaatggaggtgacaggttgatggggttgatgggtacagcaaaccaccatggcacgtgtatacctatgtaacaaaactgcacgttctgcacgtgtaccccagaacttaaagtataataaaaaagggggggacaaatatatgaggtaatagatatatgaattagcttgattgtgatgattatttcatgatgcatatgtgtatcaaaccatcacactgtataccataaacatatacaatttttgtttgtcaatttttcttcaatagcacctagggaaaaattaaactttgatgctattgatttttttccatctgtacccatcggtggtcttcttggagagaaagaagaaaacttgggaacattgccattttctaacttctgacataaaatgctttcttcttctccaagtattttggtggattgagttgccttagtctgggttctgccagaaggcaactctgagacaagatttatgtgccaatagtttacttgggaggtgctacaggaaaacgctggtagggtacagagaaaagaggcaaggaagggaaggaagccgagggcatgatcatgccagtttccaccataggcaattggagcaccaggaattggtacagaacactcacctcacagttatcactcaaaaggtgaggtaggtgggcatttttccaccaatccacatcagtgactggttgagaaaaataatttccctttcctggaagcagtaatttccctttactttcagcctcccgagcaatcaaagagaattcagacaaaaaaaaaaccaaaaaacgaaaggtgttaacagtttgccgacgacctgggtgcatagaaatgtaacttgtttactacaaaagtcaatttctgtcttttcaggtgactcagtcttttaacaatgcaaaggctcttcccctaattcctgcagttctaaattactgagtgccccattctagaatagtgtgagactcaacttgatctttcaggcaagcttacctgcactgttgcttaggcctggccagtccctctacagtcctttcctacccctattggactccctgggggaaatattaatcaatgaaacaagataggtccactagggaaagaaactattgatgccttttcaatatcataaaggcataaaacatctattgtttcagtctgacatgttaaggagagagaggaataaaactgaaaaataaacaaaaaacaactctagcatcttcgaaggagaaaatgatttccagtttagtgacacagcctcaaagacctaagcacaaacattaatggaagtacttacctggaaatcactgaaagggttttgtggttgtttttcttatgttttttcaaagtactctgtagaaaaaatcttgaaaagaaagcgctctgagatgtctacatcttaaaagaatagaatttttataatgcttatgacaactacttataaagtacatcagttaaaaaaaaatctcattgtgttttgctgtaataacctaaaagctgcttctgaaagtgcccaccagcccaggaagcagttcgtacactcagagatcacaactaagctgagaaggagcattgctgtcctcagacaagggctggggatgggggcaggagaaatgcaacataaaggcaggtgttttctttttcctgacccaaatgtcaggaagtgaaaaagtctacaaaacaatgttaactcatctgttcctcataatttgatttggaaaataattaagttgttattattaactccaataaagcacacagggagcctctgtgacataactattatgagattcattggactcaaactttgtaggactttttaactttgaagttgtaagcttgaggttgaaccaatgtagtatttctcactttattttttatagactttaaagccggaaaatgtactgaccttgggaatagcaagagaaagtacttcctttccctctcctgacaccaagtgatcccatccctgtgtttaggcctagtccaaccttctaagctgtgcgtcgcttccatgctttggagcattttacatatatttacccacttcatcctcaagacaataccattaagtatgcacgatcatcaactccattctacaaatgaagaaaccggcacagtgaaggtaagtagttttccctggtctcatagttagtaagggtagagcaagaatttgattccaggcagccctggagttcatggctcctagagattgtccttacctggcttgaccaacagtcccaggaaacaagttgtgaaggagacgcagtggattttattttgttgtgttttgtttggagggtttgtttgttgtttgataacattgatcttcatgtctccttaccctttctagaacttccttaaaatcatctaaagtctcctggcctgttgtcataggcctgaacattttctaaccaatgttatttaaacatttacatgccgtcttctccaggacactgtcttatttgtctttgtagctctcataggatttagtatccttgtttatacatagtaggttatatatatttttatgtgtgtgtagatttatatttatatgtatatgtatagttgtatgtgcatatggatgtatatgtatgtatgtatacatttagtatataccatgtcttaatcaattacacaatgttttgactctaccattctgcatgagaaaaccaagccatttctcacactcaaatttgaccatgcaaccacatgaatatgacagcactcgacatatcagacacattggaaaacattctgactttcccaaggtctcaggctatttatcaagctcaatacaaaaaagcatttcatgtacatgtgttttgaaacatttcagctgtttcatatcacatgctacttagaagtaggaaatgattgcagtatggttttaaaaatatggtacacaggtatttcttgtatttctataagtttcaaaagaaaatgacaattcaccaatttcttgctgaagacatgcgcataggcacacatggttttctcacctgcgcttatcatggtacctggttagtaagagtaaactctttagggctagtgagagaaggaagtaacatttcacaaattcgagaaagaaatgtaaagcaaaatagttaaaatagaggaatggaactagtaaagaaaacataagatactcttccaggaaaattattattattattattattattattttttgagatggagtctcgctctgtcgcctaggctggagtgcagtagcacaatcctggctcactgcaacctctgcctcccaggttaaagcgattctcttgcctcagcctcccgagtagctgggattacaggtgcatgccaccatgctggctaatttttggtatttttagtagagacaggttttcaccatgttggccaggatggtcttgatctcctgacctcgggatccacccatctcggcctcccaaagtgctgggatttcagacatgagccaccgcaccctgccgaaaattctttacactaaaaaatgataactcttgttactgtaagtttcttaaaatttcaatatagcaatttttagcattgtgcctacatagttcttaggacaaggaaggctacttctgatattctttgaagaatccttctatggatttttagatcctttttgtcaagaaatacctcaggtaatccttgcttagcaatgttttattaggtagagaacatggcagtatattttggatataatccaaatctacagtggggtggtacatgtgagaagtttgatacaacttaaaaagacctagtctggtgctcgctttggcagcacatatactaaaattggaacaatacagtgaagatcagcatggcctctgcacaaggatgacaagcaaatttgtgaactgttccatatgtttttgaacaatgataacacgtggaaacagggaggggaacatcacacattggtgcctgtcaggggatgggagacaaggggagggagagcattagtacaaattcctaatgcatacaggacttaaaacctaaatgacgggttgataggtgcagcaaaccaccatggcacatgaatacctaggtaacaaacctgcatgttctgtacatgtatcccagaactcaaagtaaaatttaaaacaatgaaaaaaaatactttaaattttaaaataaacttaaaatttacttagaaaacaaaaggcttagtctcaaattctagtccagactctgctaggcatgacctcctacattcctattgtccctctagagtaatgactttaatcaccaaaaaggggttgagtccgaagcttctgtagtttcttccttttctagaatgctatcaaaagcatctgattttggcagctcatattccaaatgtgccattaaagtcacaatttatgtgtctgactcaagtagattaataaagagtacagtcattaccacatgtattggatcaaaaaaactgtttactcttattttccctcttattgtattggcaacctacttccctaaattgactaaaactaatctgttgtttagaaagtcatgtagacataaattaggtgaggtaaagatggttttagtttagatccctaaatagggatcaacaatactctttttcctcctaacattcctggcttagtgacctgactttattttgactatattataaagcaaaggatatggtagttttagttaaattgttattataagctagtttggaatagtagtatcatataatgtgtgttcaataaaggaaattagtagacttgaaaacaattctttctatcctagagctcgtagtagaatagatttaacttattattttaagcaccttctaaattgttaataagatttgctgatgacaccctacacagtagcagtcagtcccccacggctaattttaaacatctgccttcataattaaacttattgtttatttcatcttaaaatgagaataatacagcacacagctatttcagaaatagatctatcactcctaaataattactagtcagagcattatcctacagataaagaaaatttatatcaataattcaataaatagatcccagtttcaagacaaatcacaatacagaccctgccatagactaaattgtgcttcttctccccgcaccccctcaccaccaccaaattcatagattgaatccctgatccccgttgtgactttatttggagatacaactgttactgaagtaatgaaagataaatgaggttatagggtggagccctgatcagacagtcttagagtccttataagtagagagaatgagaccagagctttctcctttgctctccactccaacagaccaaggaatgaccacatgagaacacagcaagaaggcatccacctgcacgccaggaagagagccctcacctgcaactgaattggctgacttcttgatcttggacttccagcctccagaactgtaagaaatagattttgttcttttctagttcctgacctcatcttccatcagcctcacctagctccctctgctccagctgtagagcctccttgctgtttgttgaatatgccaagtagttctttgccttaagatctttgcaggggctgttccctctacttggatttttttgtccctcagggtatctccctcatcctcttcagcctttgttcaaaactcaatttctcaatggtgattaccttatttaaaactgtcatctacctcctataaccacccctccagcatgactgatttacctgtcctgttctacttttgtttccatagcatttaatttacttatttattacagttatggtttattttgttttcccctaatagaatgtaaccttctacatcacaaagatttgtgtctgttttgttaatggttttgttcataggactaaaagagtgtctgacaaatagtaggtattcaaaaattgctgaatgaataatctaatataccacgaagatattaatatgttactaatcatctgaatatactaaaaatcacttataagtctaatcttctaatatagtaatatggtaatctaatataagttggtaagcatttgaagtgtcacaggtttccatggaagagacacatccttttgagtgtgctgactgagcattattgctagaggtaggcctctcacaggcctggttagaacagtcaggtattgctagacaagaaagcaataaaaaggaaagaatcttactgggcttcactgtggagatgaccagcaaacccatttggggatgcagtggtaatagcttaatgatcaaattgaggctgtgaatcagaattttaggtgaataacttaaatcaggatcatccagcaagtcttttgaaaaataaatccattggcctgatagattatgtgatggatcattaatctctggatgtaaaatttccagaaactgaggcatgagtacacagaggaaactgcacttgccatgctccccaaaaagaagagttcataaagtcaacatattcatcatcatgtatgtcaataaacatctttagagggagacttttgctctgaccctgggtgctgctgtgcccctgataacagatgaatttctttccttctgcaccacccccaaggcccgcaatctgtatggcatggacatattcatatggaagcaacaaaatttctcccacttcttccccggacacattgtttatcattttcaacttctacctaaagtgtggaatatatattttccttttaccaagacaaggtcctgttctcaacaatttgtttcaatggcccacaggggagaataggtgttttttcgcataaccacatgtgaaatgtggatttttctttcagcaatttctgacatatattttctctttctcttttctttgctttcgtgtctttcaaatctcttatggtgacacaaaattttgtgagcaaaataaaatgtctagaactcgtcaatgaaatttatttgaggataacttttttttaaactgtaatatatattttcatttcaattaaaatgtgaattccctttggttttcttcacttagagaaatgaaggaattttaatttaaatacgggaaagttctacattttttactatatactgtagtaagtactacgtgaatgcaaattggaaagggctatttccttaaaagtagaaatcatgcctggaaaaaaaattttttaaaaacttccaaattccaagcaataacaaagcatatgttaacactttctctgttaaaagttttatgttagtgtaggtggcttattacaaaggtctttctattggtttcagttgctaatgactataagcattgtcacctggttttgttatttcagaatgatgttgcagcatgttcccttacattacaacaatctctggccttttttctgagtcaaggtcaaggtaggaaacatcaagtttgaaaggaaaagggctactgcctactcttttaagcaagaaccatctttataaggacttaaagagtctcaaaatcatctcaaatattattaaaatgataggatatgaataataaataaaggttgtaatcaaaaacatcaggcaagatggcctagctatctaatgaaacaccaggctcttccatgagagctagtgactaggaagagccaagaggaggttaatggtacctctttagatcattcagcatgggctgtgtgacgtgattccatagtgtcttgcaatggccatcaacctctataggaaatggctaagtcacacaagaaagatgcatagcttcacatggtgtcagggagccccatacatgacttcagctgacaatgtattttagttcagtggttttcatcactgagctctaagatatagctaggcatgccaagaggaacaaactttcaataacttgaaaaaaaagtttttgtgtcttaccttgttgaaggctatgctcagtagcaatcttctaatacccacaggtgttagaaccactgaatcctgaatttgtttggatactgtgtgctctatagatttttttttaacttctaacaatctctgaaatgcatctaataatagatcttctgttactgactctagagtcaaggaaaattaagcatttcttccagatttggtctagggcaacttcttttaataagaggtgaagtcagtgaggtttcaatttgactttcagagtaattcaggttaatttatttttaaagagcacacatttggttgctatgtagggatttgcacacttgccgttatgggtaggatgaaaggaaatgggaatcatttctcccagaatgcttgctttcatgagttagactcagagtgattcatttcaccctattggtagtattcagcagagaaacagtcattgtactgttcagttcatcattgatatgaatttggctttagttacagagaaaaagatgcccacttaggtatatgaagggattgtgtcagtctcctaagagactcagaagggttaagcacagcttgaggaaaacccccaccatggcatttaggatctgaaagtccttagaggtgttgctatgccaagttcaagtccataaagctcacagcactttccacctgcttgagtccattcacccttagttttcaaccacacccaaaggcctcaggaagatgtatttttaactcctactacaccaagaaactgatctggctggctgtcatccattcccaaaactctttctgcctccaccatttctctggcaggaaatcctccaacgctgccttgctttaccatttaattgtgaactattcatgcatggccctccccagtgagtctgagggcctgtcaagtataaagtcagacctcagcttatgttggtggtttttcccctccttccctttacccctcccatagtgctttatcctgtgtacattttaagtaaattgctttactgaataggactataatcttttttttaattattattatactttaagtctggggtacctgtgcagaacggtgaggtttgttacataggtacacatgtgccatggtggtttgctgcacccaacaacctgtcatctacattaggtatttctcctaatgctatcccttccctagcctcccaccactctgcaggccccggtgtgtgatgttcccctccctgtgtccatgtgttctcattgttcaactcccacttatgagtgagaatatgtggtgtttggttttctcttcttgtgacagtttgctgagaatgatggttcccagcttcatccatgtccctgccaaggtcatgaactcatccttttttatggctgtatagtgttccatggtgtatatgtgccacactttctttatccagtctatcattgatgggtatttgggttggttccaagtctttgctattgtgaacagtgctgtaataaacatatgtgtgcatgtgtctttatagttgaatgatttataagcttttgggtatatagccagtaatgggattgctgggtcaaatggtatttctagttctagatccttaaggaatcactacactgtcttccacaatggttgaacgaatttacactcttacactaacagtgtaaaagtgcttctatttctccatatcctctccagcatctgttgtttcctgacttgttaatgatcgccattataactgacatgagatggtatctcattgtggttttgatttgcatttctctaatgaccagtgatgataagcattttttcatatgtttgttggctgcataaatgtcttcttttgagaagtgtctgttcacatcctttgcccactttttgatggggtggtttgttttttcttgtaaatttgtgtaagttctctgtagattctggatattagccctttgtcagatggatagattgcaaaaattttctcccattctgtaggttgcctgttcactctgatgatagtttcttttgctgttcagaagctctttagattaattagattccatttgtctattttggctttggttgccattggtcttggtgttttagtcaggaagtctttgcccatgcctatgtcctgaatggtattgcctatgttttcttctagggtttttatggttttaggtcttatgtttaagttcttaatccatcttgagttaatttttctataaggtgtaaggaagggatccagtttcagctttctgcatatggctagccagtttttccgacaccatttattaaatagggaatcttttccccattgcttgtttttgtcaggtttgtcaaagatcagatggttgtagatgggtggtgttgtttctgaggcctctattctgttccattggtctatatatctgttttggtaccagtaccatgctgtttttattactacagccttgtagtatagtttgaagtcaagtaacatgatgcctccagcttttttctttttgcttagggttgtcttggctacatgggctcttttttggttccatatgaaatttaaagtagttttttccaattctgtgaagaaagtcaatggtaacttgatggggatagcattgaatctatgaattactttgggcagtatggccattttcacaatactgattcttcctatccatgagcatggaatgtttttccatttgtttgtgtcctctcttatttccttgagcagtggtttatagttctccttgaagaggtccttcatatcccttttaagttgtattcctaggtattttattctctttgtagcaatagtgaatgggagttcactcatgatttggctctctgtttgtctgttattagtgtataggaatgctagtgatttttgcactttgattttgtaacctgaaactttgctgaagttgcttatcagcttaaggagatttgaggctgagatgatggggtttcctaaatatacaatcatgccacctgccaacagagaccatttgacttcctcttttactaattgaatactctttatttctttttcttgcctgattgccctggccagaacttccaatactatgttgaataggagtggtgagagagggcaccttgtcttctgccagttttcaaagggaatgcttccaatttttgctagttcagtgtgatattggctgtgggtttgtcatcaatagctcttgttattttgaggtatgttccatcaatacctagtttattgagagtttttagcatgaagggctgttgaattttgtcgaaggccttttctgcatctattgagataatcatgtggtttttgtcattggttctgtttatgtgatggattacatttattgatttgcgtatgttgaaccagccttgcatcccagggatgaagccaacttgatcgtggtggataagctttttgatgtgctgctggattcagtttgccagtattttgctgaggatttttgcattgatgttcatcagggatattggtctaaaattttctttttttgttgtgtctctgcctggttttggtatcaggaaaatgctggcctcataaaatgagttagggaggattccctctttttctattgattggaacagtttcagaaggaatggtaccagctcttctttgtacctctggtagaattcggctgtgaatccatctggtcctggaccttttttggttggtaggctattaattactgcctcaatttcagaacttattattggtctattcagggatttgaattcttcctggttaatcttgggagggtgtatatgtccaggaatttatccatttcttctagattttctagtttatttgcatagaggtgttcatagtattctctgatggtagtttgtatttctgtgggatcagtggtgatatccgctttatcatttttttattgtgtctacttgattcttctctttttcttgtttattagtttgctagtggtctattttgtcaatctgtttaaaaaaatgggtcctggattcattgatttttttaaagggatttttgtgtctctgtctccttcagttcatctctgatggtagttatttcttgtcttctgctagtttttgaatttgtttgctcttacttctctaatgcttttaattgtgttgtttgggtgttgattttagatctttcctgctttctcttgtggacagttagtgctataaatttccctctaaacactgctttagctgcaccccagagattctgctacattgtgtctttgttctcaaagaaagaacaaagaaaatctttctttatgccttcatttcattatttacccagtagtcattcaggatcaggttgttcagtttccatgtagttgtgtggttttgagtgagtttcttaatctgagttctaattcgattgcactgtggtctgagagactgtttgttatgatttcttttctttcacatttgctgaggattgttttacttcccattatgtggtcaattttagaataagtgtgatgtggtgctgagaagaatgcatattctgttgatttgggatggagagttctgtagatgtctattaggtgtgcttggtccagagctgagtacaagtcctggatatccttgttaattttctgtctcgttgatatatctagtgttgagagtggggtgttaaagtctcccactattattgtgtgggagtctaagtctctttgtaggtctctaagaacttgctttatgaatttgggtgctcctgtattgggtacatatatatttaggatagttagcttttcttgttccattgatccctttaccattacacaatggccttctttgtctcttttcatctttgttgggttaaagtctgttttatcagagactaggattgcaacccctgcttttttttgctttctgtttgcttggtaaatattccttcatgcctttattttgagcctatgtatgtcttttcgtgtgagatgtgtctcctgaatacagcacaccaatgggtcttgactctttatccaatttgccagtctgtgtcttttaattggggcatttagcccatttacctttatggttaatattattatgtgtgaatctgatcctgtcattatgatgctagctggttattttgcccattggttgatgcagtttcttcatagcgtcaatggtctttacagtttggtatgttttttcagtggctggtaccagttgttcctttccacgtttagtgcttccttcagggcctcctgtaaggcaggcctggtggtgacaaaatctctcagcatttgcttgtctgtaaagaattttatttctccttcgcttatgaagcttagtttggctggatataaaattctgggttgaaaattcttttctttaagaatgttgaatattggcccccactctcttctggcttgcagggttcctgctgagagatccactgttagtctgatgggcttctctttgtgaataacctgacctttctctctggctgcccttaacattttttccttcatttcaaccttgatgaatctgatgattatgtgtcttggcattgctcttctcaaggaatatctctgtggtgctctctgtatttcctgaatttgaatgttggccagccttgttaggttggggaagttctgctggataatatcctgaagagtgttttccaacttagttccattctccctgtaactttcaggtacaccaatcacacgtagatttggccttttcacatagtcctgtatttcttggaggctttcttcatgacttttcactctttttttctctaatcttgtcttctcgctttatttcattgagttgatcttcaatctctgatatcctttcttcttcttgattcatttggctattgatacttgtgtgtgcttcatgacgttctcatgctgtgtttttcagctccatcaggtcatttatgttcttctctaaacaggttattctagttagcaattcatctaaccttttttcaaggttcttaacttccttgcattgcattagaacatgctcatttagctcacaggagtttgttattacccaccttctgaagcctacttctgtcaatttgtcaaactcattctctgtccagttttgttcccatgctggcaaggagttgtgatcctttggaggagaagaggcattctggtttttggagttttcagcctttttacactggtttctccccatcttcatggatttatctacctttggtatttgatgttggtaatcttcagatgggggtctctgagtggacgtcttttttgttgatgttgctactattcctttctgttcgttagttttccttctaacagtcaggcccctcttctgcaggtctgctggaatttgctggaggtccattccagaccctgtttgcctgagtatcaccagtggagtctgcagaacagtaagattgctgcctgttccttcctctggaagctttgtcccagagcggcacctgccagatgccagcaagagttctcctgtatgaggtgtctgttggcccctactgggaggcgtctcccagtcaggacacatgagtgtctgggacccacttgaggaagcagcctgtcccttatcagagcttgaatgctgtgctgggagatccactgctctcttaagagctgtgaggcagggatgtttaagtctgctgaagttgtgaccacagtcacccccagggagatgggggttttatctataagtccctggctggtgcctttttaatcagagatgccctgcctagagaggcagactggcctcagcagccttgctgggctgtggggggctccatccagttcaaacttccctgcagctttgtttatactgtgaaggtaaaactgcctactcaaacctcagcaatggcatacgcccctcccccaccaagcttgagcatcccaggtggacctcagactgctgtgctggcagcaagaatttcaagccagtggatcttagcttgctgggctccataagggtgggacccaccaagccaggcaccggagggaatctcctggtctgctggttgtaaagaccatgggaaaattgcagtatctgggcaggagttcactgttcctcccagtacagtctctcatggcttcccttggctcggaacaggaaatcccctgaccccttgtgcttcctgggtgaggtaatgccccaccctgcttcagctcactctccatgggctgaacccactgtccaatcagtcccaatgagatgaactgggtacctcagttggaaatgcagaaatcacctgccttctgcactgatctcactgggagctgcagactggagctgttcctattcacccatcttgccaacaagttcctaggactgtcatcttttatagaaaaaaatgccttcagacagattggttctgtgactgtttataagtttatattctagccccatagacaaatttttcaaaaaagatcccaactgtaataacatttctcccaaggagtgattaaaaaccaaatctgaatggacactactgtcttactaatgggctgtggaaaatgcaataatgatgcttgtgaaattattagattcaggaataatgtattattctagaattgtgctaattcatttcccacttctgatcatttgaagtttacttctctctcattgaaaaggattaatgatatgtttattaaataaagactaattttattttatgttttttgtgtttttttttttgagatggagtctcgctgtcacccaggctagagtgcagtggcgcgatcttggctcactgcaggatccgccccacggggttcaagccattctcctgcctcagcctcccgcatagctgggactacagatgcccgccacctcgcctggctaattttttgtattttagtagagacggggtttcaccgtgttagccaggatggtctcgatctcctgatctcatgatccacctgcctccacctcccaaagtgctagattacaggcgtgagccactgtgctcggcccaaaaaagactaattttaaaagagctttgctggctcgactttatgtaaaaatagcatgaaagaaaaggagataataccatattttatgaaataccctctgagactcttctttgttaaagaaacaatttgtaaactgtcctgacattataaactctttgtcttcttagtctgacatgagggtgccaagcttagtgatttgtagcatggaaagatgagtgctgtagctggacactcgtagtcacacaaaggttctgttggtttggaaggtgagcgtttcatattcttgccccacaagtaagccaatgttccaccccagggacaagtatatttcctgaattatgagaaggagcaagagagcatgtccatcccatgttcttgagaagtcctggctcgagccaataaagctcatcgttgtctgaaagaatggagatcaatttcagtctgctgtcacacagactctggcagccggagatcaacaggatctcataacagtaaacctggtgctttccagggcagagccccaagttgctaacagcctctcagacttaaaaaagtaagttcacacagaacaattgtattctcacagtcagcattgtgatcttcctctggttcttcatatatttaataaacctttaaaaccagaatcctgagaaatgtcccatcccttcccacacaaacacatcagcctcttctactatgtactcatacacactgaccagcattttcttttttatcttaggaactaacagaatcaaagatatggagttttaaggttatcttttgaagcagacctttactttatgaagataattattaaagtatattgatactctgttgaggcatattgctccaggggtcttgacattttgttggtctaattatctgcagcaaatacggtatccaaagttcccagtgtggggaaaagaaagagagatcagattgttactgtgtctgtgtagaaagaagtagacataggagactccattttgttctgtactaagtgtcaggcctctgagcccaaggcaagccatcgcataccctgtgacttgcacgtatacacccagatggcctgaagtaactaaagaatcacgaaagaagtaaatatgccctgccccaccttaactgatgacattccaccacaaaagaagtgtaaatggccggtccttgccttaactgatgacattaacttgtgaaagtccttttcctggctcatcctggctcaaaaagcacccccactgagcaccttgcgaccccccctcctgcccactgagcaccttgcaacccctactcctacccgccagagaacaaaccccctttgactgtaattttcctttacctccccaaatcctataaaatggccccacccttatctcccttcgctgactctcttttcggactcagcccgcctgcacccaggtgaaataaacaaccatgttgctcacacaaagcctgtttggtggtctcttcacacggacgcacatgaaatttggtgccgtgactcggattgggggacctcccttgggagatcaatcccctgtcctcctgctgtttgctccatgagaaacatccacctacgacctcaggtcctcagaccgaccagcccaagaaacatctcaccaatttcaaatctggtaagcggcctctttttactctcttctccaacctccctcactatccctcaaactctttctcctttcaatcttggtgccacacttcaatctctcccttctcttaatttcaattcctttcattttctggtagagacagaagaggcatgttttatctgtgaacccaaaactctggcgccggtcacggactgggaaggcagccttcccttggtgtttaatcattgcagggacacctctctgattatacagtcacatttcaagggtgtcagaccacacagggatgcctgccttggtccttcacccttagcggcaagtcccgctttcctggggcaggggcaagtacccctcaaccccttctccttcacccttagtggcaagtcccactttcctagggggcaagaagcccccaattgcttatttccgcaacccaacctcttatctctgtgccccaatcccttatttctgcaccctgacctcttatctctgtgccccaatcccttatttccatgccccaaccccttctttgcttttctggagggcaagaaccccccgccccttctccgtgtctctactcttttctctgggcttgcctccttcagtatgggtaagcttccaccttccattcctccttctcccttagcctgtgttctcaaaaacttaaaaccttttcaactcacacctgacctaaaacctaaatgccttattttcttctgcaatgccgcttgaccccaatacaaactcgacagtagttccaaatagccagaaaatggcactttgaatttttccatcctgcaagatctaaataattattgtcataaaataggcaaatggtctgaggtgcctgacgtccaggcattcttttacacactcagtcccttcctagtccctgtgcccagtgcaactcgtcccaaatcttccttctttccctcccacctgtcccctcagtaccaaccccaagcgtcgctgagtctttctaatcttccttttctacagacccatctgacctctcccttcctccccaggctgctcctcgccaggccaagctaggtcccaattcttcctcagcctccgctcctccaccctataatcttttcatcacctcccctcctcacagctggtccggcttacagcttcattccgtgactagccctcccccacctgcccagcaatttactcttaaaaaggtggctggagcgaaaggcatagtcaaggtgaatgctcctttttctttatcccaaatcagatagcgtttaggctctttttcatcaaatataaaaatccagcccggttcatgacttgtttggcagcaaccctgagacactttacagccctagaccctaaaaggtcaaaaggccgtcttattctcaaaatacattttattacccaatctgctcctgacattaaataaaactccaaaaattaaattctgaccctcaaaccccgtaacaggatttaattaacttcaccttcaaggtgtacgatagtagaaaaaagtttcaattccttgcctccactgtgagacaaaccccagccacatctccagcacacaagaagttccaaacacctgaaccgcagtggccaggcgttcctccagaacctcctcccacaggagcttgctacacgtgccggaaatctggccactgggccaaggaatgcccgctgcccgggattcctcctaagctgcgtcccatctgtgtgggaccccactgaaaatcggactgttcgactcacctggcagccactcccagagcccctggaactctggcccaaggctctctgactgactccttcccagatcttctcggcttagcggctgaagactgacactgcccgaacgcctcggaagccccctagaccatcacggatgctgagctttgggtaactctcacagtggaaggtaagccagtccccttcttaatcaatacacaggctacccactccacattaccttcttttcaagggcatgtttcccttgcctccataactgttgtgggtattgacggccaggcttctaaacctcttaaaactccccaactctggtgccaacttagacaatactcttttaagtactccttttatttatccccacctgcccagttcccttattaggctgagacactttaactaaattatctgcttccctgcctattcctggactacagctatatctcattgccacccttcttcccaatccaaagcctcctttgcgtcctcctcttgtatccccccaccttaacccacaagtataacatacctctactccctccttggtgaccgatcatgcaccccttaccatcccattaaaacctaatcacccttaccccactcaacgccaatatcccatcctgcagcacactttaaaaagattaaagcctgttatcactcgcctgctacagcatggccttttaaaccctataaactctccttacaattcccccattttacctgtcctaaaaccagacaagccttacaagttagttcaggatctgcaccttatccaccaaattgttttgcctatccaccctgtggtgcccaacccgtacactcttttgtcctcaataccttccttcacaactcactattccgtgcttgatcttaaagatgcttttttcactattcccctgcacccctcgtcccagcctctctttgctttcacttagactgaccctgacacccattaggctcagcaaattaccaaggctgtactgctgcaaagcttcacagacagcccccattacttcaatcaagcccaaatttcttcctcatctgttacctatcttggcataattctcataaaaacacacgtgctctccctgccaatcatgtctgacctctcaaaccccagcaccttctacaaaacaacaactcctttccttcctaggcatggttagtgtggtcagaattcttacatagccaggaccacaccctgtagcctttctgtccaaacaacttgaccttactgttttagcctagccctcatgtctgcgtgcagtggctgccgctgctttaatacgtttagaggccctcaaaatcacaaactatgctcaactcactctctacagttcttataacttccaaaatctattttcttcctcatacctgatgcatatactttctgcttcctggctccttcagctacactcactctttgttgagtctcccacaattaccattgttcctggcctggacttcaatccggcctcccacattactcctgataccacacctgacccccatgactgtatctctctgatccacctgacattcaccccatttccccaaatttccttctttcctgttcctcaccctgatcatgcttgatttattgatggcggttccaccaggcctaatcaccacacaccagcaaaggcaggctatgctatagtatcttccacatctatcattgaggccactgctctgcctccctccactacctctcagcaagctgaactagttgccttaactcaagccctcactcttgcaaaaggactacgtgtccatatctatattgattctaaatatgcctttcatattctgcagcaccatgcagtcatatgggctgaaaaaggtttcctcactacacaagggtcctccatcattaatgcctctttaataaaaactctgctcaaagccgctttacttctaaaagaagctggggacattcactgcaaggggcatcaaaaggcatcagatcccattgctctaggcaatgcttatgctgataaagtggctagacaagcagctagctttccaacttctgtccctcacggccagtttttctccttcacttcagtcactcccacctactcccccactgaaacttccacctatcaatctcttcccacacaaggcaaatggttcttaggccaaggaaaatatcttcttctagcctcacaggcccattctattctgtcgtcatttcataacctcttccatgtaggttacaagccgctagaccgtctcttagaacctctcatttcctttccatcatggaaatctatcctcaaggagatcacttctcagtgttccatctgctattctactacccctcagggattgttcaggcctcctcccttccctacacatcaagctcggggatttgcccctgcccaggactagcaaattgactttactctcatgcctcgagtcagaaaactagaatatctcttagtctgggtagacactttcactggatgggtagaggccttccccacagggtctgagaaggccaccgcggtcatttcttcccttctgtcagacataattcctcggtttggccttcccacctctatacagtctgataatggaccagcctttactagccaaatcacccaagcagtttctcaggctcttggtattcagtggaaacttcatatcccttaccatcctcaatcttcaggaaaggtagaacggactaatggtcttttaaagacacacctcaccaagctcagcctccaacttaaaacagaatggacagtacttttacctcttgcccttctcagaatcagagcctttcctcgagaagctacagggtacagtccatttgaactttcatatggatgcactttcttgcttggccccaacctcatcccaggcaccagccctctaggtgactatcttccagtactccagcaggctagacaggaaattcaccaggctgctaatcttctcttgcctactccagatccccagctatatgaagacaacctagctgggcgatcagttcttgttaagaatctgacccctcaaactctacaacctcgatggaccggaccctacttagtcatctatagtaccctgactgccgtccgcctgcaggatcctccccactgggttcaccgttccagaataaagctgtgtccatcggacagccagcctaatccctcctcttcctcctggaagtcgcaagtactctcccccacttcccttaaactcactcgtatttctgaagaacagtaataacacttacgagcctaatacatcccttcattctattaggtctgttcgtccttaccctactttttgcaacagggctttaagaagtcaccccaccacttaggccaagccccaaaaaactagtcatccctactatcttctgtccggtcatactcctattctccattctcaactacttataaatgctctactcttgtttacaccgctggtttacactgtttttccaagccatcaaagctgatatctcctggtgctatccccaaactgccactcttaactcttgaagtaaataaataatctttgctggcagggctatgctgaatctccttaggcactctctaattagatgtcctaggtcctcccaattcttagtccttttatacctgtttttctccttctcttattccatttagtttttcaattcatataaaaccgtatccaggccatcaccaatcattctatacgacaaatgtttcttctaacatccccacaatatcaccccttaccacaagacctcccttcagcttaatctctcccactttaggttaccacgccgccccaatcccccttgaagcagccctgagaaacatcgcccattctctctccatatcaccccccaaaaattttcaccgccccaacacttcaacactattttatttttcttattaatataagaaggcaggaatgtcagccctctgagcccaagccaagccatcgcatcccctgtgacttgcacgtatacacccagatggcctgaagtaactaaagaatcacaaaagaagtgaatatgccctgccccaccttaactgatgacattccaccacaaaagaagtgtaaatggccagtccttgccttaactgatgacattaccttgtgaaagtccttttcctggctcatcctggctcaaaaagcaccccccactgagcaccttgcgacccctactcctgcccactgagcaccttgtgatccccactcctacccgccagagaacaaaccccctttgactgtaattttcctttacctccccaaatcctataaaatggccccacccttatctcccttcgctgactctctttttggactcagcccacctgcacccaggtgaaataaacagccatgttgctcacacaaagcctgtttggtggtctcttcacacggatgcacatgaaactaagaaaaattcttctgccttgagatgctgttaatctataaccttatccccaaccccatggtctctgaaacatgctgtgtccactcagggttaaatggattaagggctgtgcaagatgtgctttgttaaacagatgcttgaaggcagcatgctccttaagagtcatcaccactccctaatctcaagtacccagggacacaaacactgcagaaggccacagggacctctgcctaggaaagccaggtattgtccaaggtttctccccatgtgatagtctgaaatatggcctcgtgggaagggaaagacctgaccatcccccagcccgacacccataaaagttctgtgctgaggaggattagtataacaggaaggaatacctctttgcagttgagacaagaggaaggcatctgtctcctgcccgtccctgtgcaatggaatctcttggtataaaacccgattgtatgttccatctactgagataggggaaaacagccttagggctggaggtgggacatgcgagcaacaatactgctctgtaaggcattgagatgtttatgtgtatgcatatctaaagcacagcacttaattctttaccttgtctatgatgcagagacctttgttcatgtgtttatctgctgaccttctctccattattatcctatgaccctgccacatccccctctccaaaaaacacccaagaatgatcaataaatactaagggaactcagaggctggcgggatcctccgtatgctgaacgctggtcccctgggcccccttatttctttctctatactttgtctttttcttttccaagtctctcattccacctaatgagaaacacccacaggcatggaggggcaacccaccccttcatctggtgcccaacgtgggggcttttctctagagtgaaggtaggctcgagcgtggttattgaggacaagtcgacgagagatcccgagtacatctacaatcagccttacggtaagctcgtgcgctcagaagctagggtgacaatggggcaaactcaaagtaaaactaaaagtaaatatgcctcttatctcagctttattaaaattcttttaaaaagagggggagttagagtatccacaaaaaaaaatctaatcaatctatttcaaacaatagaacaattttgcccatggtttccagaacaaggaactttagatctaaaagattagaaaagaattggtaaagaactaaaacaagcaggtagggagggtaatatcatcccacttatagtatggaatgattgggccattattaaagcagctttagaaccatttcaaacagaagaagatagcgtttcagtttctgatgcccctggaagctgtgtaatagattgtaaagaaaagacagggagaaaatcccagagagaaacagaaagtttacattgcgaatatgtagcagagccggtaatggctcagtcaacgcaaagtgttgactataatcaattacaggaggtgatatatcctgaaacgttaaaattagaaggaaaaggttcagaattagtggggccatcagagtctaaaccacgagggccatgtcctcttccagcaggtcagatgcccgtaatattacaacctcaaacgcagtttagagaaaataagacccaaccgccagtagcttatcaataatggccgccagccaaacttcagtatcggccacccccagaaagtcagtatggatatccaggaacgctcccagcaccacagggcagggcgccataccctcagccacccactaggagacttaatcctatggtaccacctagtagacagggtagtgaattaccagaaattattgataagtcaagaaaggaaggagatattgaggcatggcaattcccaataatgttagaaccacctggagaaggagcccaagagggagagcctctcacagttgaggccagatacaagtctttttcgataaaaatgctaaaagatatgaaagagggagtaaaacagtatggacccaactctccttatatgaggacattattagattccattgctcatggacatagactcattccttatgattgggagattctggcaaaatcgtctctctcaccctctcaatttttacaatttaagacttggtggattgatggggcacaagaacatgtctgaagaaatagggctgccaatcctccagttaacatagatgcagatcaactattaggaacaggtcaaaattggagcactattagtcaacaagcattaatgcaaaatgaggccattgagcaagttagagctatctgccttagagcctgggaaaaaatccaagacccaggaactgcctgcccctcatttaatacagtaagacaaggttcaaaagagccctaccctgatttggtggcaaggctacaagatgttgctcaaaagtcaattgctgatgaaaatgcctgtaaggtcatagtggagttgatggcatacgaaaacgccaatcctgagtgtcaatcagccattaagccattaaaaggaaaggttcccgcaggatcagatgtaatctcaggtatgtaaaagcctgtgatggaactggaggagctagcataaagctatacttatggctcaagcaatagcgggagttgttttaggaggacaagttagaacatttggagggaaatgttataattgtggtcaaattggtcatttaaaaagaattgtccagtctcaagtaaacagaatataactattcaagctactacgacaacaggtaaaaagccacctgacttatgtccaacatgtaaaaaaggaaaacattgggctagtcaatgtcgttctaaatttgatagaaatgagcaaccattgtcgggaaacaagcaaaggggctagcctcaggccccacaacaaactggggcattcccaattcagccctttgttcctcaagggttttcagggacaacaacccccactgtcccaagtacctcagggaataagccagttaccacaatacaacaattgtcccccaccacaagcaacagtgcagcagtagatttatgtactatacaagcagtctgtctgcttccaggggaacccccacaaaaaatccccacaggggtatacggcccgctgcctgaggggactgtaggacttgtcttgggaagatcaagtctaaatccaaagggagttcaaattcatactggtgtggttgattcagactataaaggtgaaattcaattgattattagctcttcaattccttgcagtgccagtccaggagacaggatttctcaattattactcttgacttacattaaggttggaaatagtgagataaaaagaacaggaggatttggaagcacggatctgacaggaaaggctgcatattgggcaagtcatgtctcagagaacagaactgtgtgtaaggccgttattcaaggaaaacagtttgaaggattagtagacactggaccagatgtctctatcattgccttaaatcagtggccaaaaaattggcctaaacaaaaggttgttacggggcttgtcagcataggcacagcctcagaagtgtatcaaagtactaggattttacattgtttagggccagataatcaagaaagtacttcccatgctaaaaaacatttattatcttgttttgctgtaatgggagttccagaaaaaattaaaactgacaatggaccaggatattgtagtaaagctttccaaaaattcttacatcagtggaaaatttcacatacaacaggaattccctataattcccaaggacaggtcatagttgaaagaactaattgaacactcaaaactcaattagttaaacaaaaagaagggggagacagtaaggagtgtgctactcctcagaggcaacttaatctagcactctatactttaaattttttaaacatttatagaaatcagactactacttctgcagaacaacatcttactggtaaaaagaacagcccacatgaaggaaaactgatttggtggaaagataataaaaataagacatgggaaatagggaaggtgataacgtgggggagaggttttgcttgtgtttcacgaggagaaaatcagcttcctgtttggatgcccactagacatttgaagttctacaatgaacccatcggagatgaaaagaaaagcgcctccatggagatggaaacaccactcacatggatggataatcctattgaagtatatgttaatgatagtgtatgggtacatggccccacagatgatcgctgccctgccaaacctgaggaagaagggatgatgacaaatatttccactgggtatcattatcctcctatttgcctagggagagcactaggatgcttaatgcctgcagtccaaaattggttggtagaagtacctactgtcagtcccatcagtagattcacttatcacatggtaagtgggatgtcactcaggccacgggtaaataatttacaagactttccttatcaaagatcattaaaatttagacctaaagggcaaccttgccccgaggaaattcccaaaggatcaaaaaatacagaagttttagtttgggaagaatgtgtggccaatagttcagtaatattacaaaacaatgaattcagaactattatagattggacatctggaggtcaattctaccacaattgctcagggcaaactcagtcgtgacccagtgcacaagtgagtccagctgttgatagcgacttaacagaaagtttaaacatttctggtcatgaacatccaaaattatggaggcttactgtagcctcataccacattaggatttgatctggaaatcaaactttagaaacaagagatcataagccattttatactatcgatctaaattccagtctaacggttcctttacaaagtttcataaagcccccttatatgctagttgtaggaaatatagttattaaaccagactttcaaactataacctgtgaaaactgtagattgattacttacattgattcaacttttaattggcagcaccgtattctgctggtgagagcaagagaaggcgtgtggatccctgtgtccatggaccgaccatgggaggcctcgccatccatccatattttgactgaagtattaaaaggcattttaaatagatccaaaagattcatttttactttaattgcagtgattatgggattaattgcagtcacagctacggctgctgtggcaggagttgcgttgcactcttctgttcagtcagtaaactttgttaatgattggcaaaagaattccacaagattgtggaattcacaatctggtattgatcaaaaattggcaaatcaaattaatgatcttagacaaactgtcatttgggtgggagacagactcatgagcttagaacatcatttccagttacgatgtgactggaatatctcagatttttgtattacaccccaaatttataatgagtctgagcatcactgggacatggttagatgccatctacagggaggagaagataatctcactttagacatttccaaattaaaagaacaaattttcaaaacatcaaaagcccatttaaatttggtgccgggaactgaggcaatcgcaggagttgctgctggcctctcaaatcttaaccctgtcacttgggttaagaccattggaagtactactattataaatttcatattaatccttgtgtggctgttttgtctgttgttactctgcaggtgtacccaacagctccgaagagacagcgaccatccagaacgggccatgatgacgatggtggttttgtcgaaaagaaaagggggaaatgtagggaaaagaaagagagatcagattgctactgtgtctgtgtagaaagaagtagacataggagactccattttgttctgtactaagaaaaattcttcagccttgagatgctattaatctgtaaccctacccccaaccctgtgctccctgagacatgtgctgtgtcaactcagggttaaatggattaagggctgtgcaggatgtgctttgttaaacagatgcttgaaggcagcatgctccttaagggtcatcaccactccctaatctcaagtacccagggacacaaacactgtggaaggctgcagggacctctgcctaggaaagccaggtattgtccaaggtttctccccatgtgatagtctgaaatatggcctcgtgggaagggaaagacctgaccgtcccccagcccgacacccgtaaagggtctgtgatgaggaggattagtataagaggaaggaatgcctctttgcagttgagacaagaggaaggcatctgtctcctgcctgtccctgggcaatggaatgtctcagtataaaacccgattgtatgttccatctactgagataggggaaaacagccttagggctagaggtgggacatgcgggcaggaatactgctctttaaggcattgagatgtttatgtatatacatatctaaagcacagcacttaattctttaccttgtctatgatgcagagacctttgttcacgtgtttacctgctgaccttctctccactattatcctatgaccctgccacatccccctctccgagaaacacccaataatgatcaataaatactaagggaactcagaggctggtgggatcctccgtatgctgaacgctggtcccctgggcccccttatttctttctctatactttgtctctgtgtctttttcttttccaagtctctcgttccacctaacgagaaacacccacaggtgtggaagggcaacccaccccttcatgtaatgtccatttaaatccataataaatggtatgcccagcctggcacgggctattgatgagtcttttgagggctggcatacatgcaacccactcaccttacccttacctccttgccaacttccctgtattgccttattactcagtcagactacacccagtctcagaaaaacaaggaaaagtgaaggaaacattgtcgatgactgagtcaggggttaattggtctcttatcatttaaacatgaaggaaagaatgtgaaagaagaaaatgatagacaagtaaaattctctagatcaatcctggagataattgtgtaaaactttgccaagtatttacctagttacaagtgctaatcactttcacgtaaaaagccttaataaactctacacagcacattattttgaatccactaaaatctaaatctgaactgtgttagatctcttctttctaaaaagtttgatatacagacctgtattacatttaaagaacactgtgagaaattcaaaaatactgagacattgatgagctgggcacttggctcaggctcctatgagacttacgatttcaaatttgctccatcaggctaattaaagggagcctgaaaaaaaagcaaaatggactaaattgggaagtcttaggatatattttaagctgggttatttaaccatctcttgtttgaaagaaatctagtaataagaatgaaaattgtgtaatggatttttttttttgtaggcatcttgtttttattgaacagatagactctattgattttgatcataaaataaatttctataagggaaagactattttccctcactgacctctattctaaatcagagaagtagtcccagagaaaaataataatacgatggtaagtgagaatagcatctcctttcaaaaaaatataactcaagaagggcctacaactacctttctcctagatcataatgttacagtctaagaggtagggttttctaatgtatttccaccatatattacacaagtaaaatttaatttggagcaataggttctattctctggatgaggtaatcctaccattgatttattcagtaaatatttttataatgtctaataacaccgtgtacttgaggaaattaaataaattaggttcttgacagtctctatatagcaaacacacagtggaatgtcaaataaacaatatttattaaatatatacaatataaattcagtattattccaagactgtagggttggtggaagaagtacggagaaataaaagaagattgagttcttagattatgaaattaacaaacttgaatatcatgcagtattttttggaggcatcatgtacagattgaagaatcccatcaggtgtttagcaaaatgaatgaaaagtaaagagcataatataaaataaaaggtcaaatttaattatccatatatattatattaataaataaatggtatagaaatcacctattataacacaaagactctcagagtggacacagagtaaaatataagtaaatgtagcatatgagtcatttacaacaaagtgacttataaagccctttagaaattttaaaatatggttcctgaaattaaaaaataataataataccatggttggaagataaagtcaaggtaccatgataaaattaaaggaaaatgaaaatgctcaataaatgtccaggtcattgaattaaaacacacacacatacacacatacacacacacacacgaaagtaggtcaaattcaaaggtaccagacaacagatattctaataacaacatgggctgctaaaatacaaagaagtgctttcaaaattccaggagaaaataatttcaatttcaatttctggaatcaaatgtggtagaatgaagtattttggtgtctcataaaatctatctcctacgtacactttcttagaaaactactggtagatgtaatacagtaaagcaatggcttaaactaagaaagaggaagacatgttttccaaacataatagctccaactacaaagcctaaatatgtcctaggatgacaccagggcagcaaggctagagagaaaccagcacaaattggagaagggtggaagatttcaggaaagaggacttcaggaattgttaaaatagatgatatgataaaacattctgatacaattaaggatatacggaaaacaataagagaatcaacaacagtgataatggttaacgtatatcgaactaattgttaaaatagatgatataattaaacattccaatataattaaggatatatggaaaacaagagaaacaacagtgataatggctaacatacattggtagagagaattatgcaactaaaaacattatacaaggactcaattattaaatttagggaaaaatgctttataaaatggaaaaatgatttggcatacactagttgcgcctaccattaccaaaatacatatagtaataataagatgagtaatgatagatttaactaaaaatactgaggtcactgactttaggaagatggtatgaagaaaagaatggaatttgaaagagcaatgttttcatttattgtaataggaaattaatatataatgtccagaattggtaattcaaataaaagcaatgtaagaatattgtttctaaatgttaaaacaactaccagaagaaacagttaagagttaaagggattgccacacagagtatgactgtgtatcagactgggtttttgtaaaaattataaaaccgccagagataatttactttttaaaattattaaatgtacttggtttatttaaaatgtttagtaaagtaaaaggtatgcattacaaaataaagaaagaactaagtggtactttcaaagatctccattacttaaaacacttgctccagctgtttttactctatgacatacactgaagtgtgtttgctaattcctgaggtataaatagtcccattacagtttatttcaagctactaacatgacatcacagaatgtggagttgagaagagatgcaaagtaacacaccattattatagtaacttcatcatacagatacagtaaatgtgaataaccttaagagcacagataataccaaaatatagtaaaattattaggaaatgatgagttttgtgtatctattaactttatttttaatataatttatttgtttataaaatttagttttttaatggttgtatggaaagcatgtaaagttttcagaaatttaacaatcgtccctcagaagcctatatgagccagcttcagcttacagctaatattgagatgcccaccatattcctgtggagtgggatgggatattagctggctggctggctggctggatggatggataaatggatggatggatggatggatggatggatggatggatggatggatggatggatgattagtcaaaatgtaactaacagaaatgattaaccacccaataggcaattctcaggactgagtttcctcttctgtgattaataccttaaaattcaaagacaacctacccataatgatagtcgctctgtgtggtggctttagtcaagcgttgttcattgttgttttataaaaagcacaattggttattttctgacacttttggccacattttttttttttttttttttttgagacggagtctcgctctgtcgcctaggccggactgcggactgcagtggcgcaatctcggctcactgcaagctccgcttcccgggttcacgccattctcctgcctcagcctcccgagtagctgggactacaggcgcccgccaccgcgcccggctaattttttttttttgtatttttagtagagacggggtttcaccttgttagccaggatggtctcgatctcctgacctcatgatccacccgcctcggcctcccaaagtgctgggattacaggcgtgagccaccgcgcccggccggccacatttacataaagtaaaatttggatgtttcatcaagtagaatatcaacaaatctaaagaaattatcaataattatcagttaccataaatctgggcctagagtgaatatttacctgaattacctgatgaaactatgttagaattaagttcttcaagtaaattacaagcacttgtgggcagattttgtgtctggtttgtttttctaacttccttagcaccaatacaatgtttaaaactagattggaatataccactcaatattacagttatttttatgtttttgtcttctgataactatgggatctacttgagggtgaaattttcatcttgtcaaatctatacaccaatgcctagtttatattaacctctcactaaatattagttcggttagattgaagagtgtccaatacatatatattgaattaaattaattagactagatcagaatttaatttgatgtcatcttagcataatcctaaaaaagctatcaaacaggctaagttttgtgtcattaggtagtataatgtatacaagggtggattcaaattccagctcatttcttatgagcttccagatcttcatcaagtatgtaatctctataaacttcattttccccacgctaacaagtagataatatggttgttatgattaaatccatacaaagtacttagcataatacctggcacacagtaagctcttaataaatgtttgctgttatattgctatgctttatgctctagataaatctgaaatgtgcttataatatatgatttgcctgaagggtgacctaggtctttaaaacagtgacacatttgcaattgaccatcacagggcttctcacaaaattgaactttataatgccatcggattgtcatagtttcccttctagaaagggaacctatgattcattaagctaaatcaagactaagtatcaagtgactattgccttttgatttgttttcttgccttaggtttgccttgatgatctggcatgttaatagaagccacgtattggtctctgtgttatctcattggatttcctgccgaccatggagattgacgggttttattagccctcacaggaaaactgattctcaaagtcaaaaatctcaagcatagaatacaagatatggacccatcgatccccactacaaaaagcctttcctagtacagactactgcctctcaaagattgcgtttctcatctcacttttcttaccaagatttctcccttgaaaaatccagggaaatcaattatgtgtgttcattcctgatcctcagttgttaacataaagttgtatactgaggcaaatttaaaacatagctgaaaatcctttgacattgatacggtttgactctgtgtccccaaacaaatctcacctcgaattgtaattcccataatcccacatgtcaagggcgggaccaagtggaggtaattggatcatgagggtggtttctcccatgctgttcttgtgatagtgagtgagttctcacaagatctgatggttttatgggcatctggcatttcccctgcttgcactcactgactctgtcctgccactctgtgaagaaggtgccttgcttccccttcaccttctgctatgattgtaagtttcctgaggcctccccagccatgctgaactgtgagtcaattataccgttttcctttataaattactcacccccacctaccaccttttagataatgctgtgggacataaagacttagaattctctcttcaaagggcttggatatggcttccagggttcatgtttctctcctccagttctgtctttcatggtgagccatgtatagagagcgcacaactagaggccctgtgggccaatgcaaagctgtttaccagaggtacagtggtagactgagcttggacatatccacagaggtacccaaaatgtgtacacacaaggcctgtcatggtgtgagaccacattgggggaccagctctccccatgcccttatattctggtactggactttgagggcccaagaattccagctctaaacttgaatttcattaggaagctacatgtgtcaaagtgggaaaacaaagcatacttaacagtttgttaacatgatttataacttttaaatatttaaacatgtactatataggtttttattattattcttgccctaggccttaagaatgttaagtgtaagacaattaaatactttattagatataagaatgcaagcacagatactcagaaacttaaatataagtctcaaactagtccttacttttaaaaaataatgatatattccatttaacatcatatttagagtggatccattatggcatcatgacatctttgctggttcagttacaattgaacaaagtattgggcctgacatcaacactatttctcaaaatgctaaagatataaaagtgtgggacagatatgtcttatgcttattttgtaacataactattcattgcatatatccaaacatcactacatactccataagatttagtcttatttacaattatttagttgtttacctaatatttgctatgtaatacacacacacaggcacacacctacacacacatatgtgcacacatacacacatgtgcacacatatatatttcaaatacaaaccataagaagcagccaggatgaatccagaggacattatgttaagcaaaataagctaagaacagaaagttaaatagtgcatgttctcaccgtatgtggatgctaaaaaatagaagatctcatggaaggaaaaagtagaacagaggatactagaggctggagaggtgggtgagagatggataaggagagatttgtcaaaaaatacaaaattacagctagacaggagaaataagttctagtgttctatagcactgtgagatgactatagttgacaataatatatagcttcaaattgctagaaggagtatattgaatgttcccatcacaaagaaatgataaatgtttgacatgatgcatatgctaattaatctcttaactattcattgtatgtatccgaacatcactacataccccataaatatgtacaattattatatgtcaattaaaaaaataaaataattaagaaaaaattgcaaaagattaaataactgtaacagtagatttgtgctctcaaatattaaagcattctataaatttacatagaatgggggtagatatataaaaattaaaaataattgaaatggaatctgggtgatagattgacaatactactcttaatattaagaatagtatagctgaaccaaagtttaacatgttcaaacctttacataaatgtatcctctctaaacgatttgaccctgcttatggataattaaggttgtaatattttggacataaacgcctgtttacttataccagaatatatcagcaattataattaaaatgatcttacatattatttgtcatatcaggactcatactatttttattatgctgaaggtatatggtgaattttttattttttttttttgagatggaatctcgctttgttgccaggctggggtgcaatggcgcgatcttggctcactgcaacctctgcctcccaggttcaagcaattctccttcctcagcctcccaagtagctgggattacaggcacatgccatcacactcagctaatttttgtatttttagtagagatgaggtttcaccatgttggccaggctagtctcaaactcctgaccttgtgatccacccgccttggcctcccaaagtgctgggattacaggtgtgagccactgcgcctggccgcttttttatcactatgatttactcatctacctttttacaaaaagaaaatgagatctcagtaacaactggcagcactatgttcctctgatgtatatgaaatatttaagttctaggcttgctcaggtataagcagagtattcataatgtcatcgtttacataaagtataaatgcacaacaccaggaatacttcaaagacaaaaagcagaaattatgctttaatgtattattacaggaaatgttggtatcttgtgcatttgtgatttggagcattgaatgtttatgacatgtttcacttgccaattttctgtctttatttggtagcagccatttattcttgaatcttattaatacatttacattcagtgtattgtttatttcatttcataaactatgacacctgagcgaaaatgactgggtttcttaatctgtacaaatcagggaggacttacaggacatggaagctgatttgtacagtatccaaagtatccattagcaagcaagctcatagggttgttgtaaggattaaaagagaaacccttatagtcaatgctacatattattattattattatttttactttttttttttttagacagagtcttgctcagtcaccaggctggagtgcagtggcatgctctcagctcactgcaacctctgcctcccgggttcaagcgattctcccgcctcagcctcccgagtagctgggactacaggcgagagccaccatgcccagctaatttttgtatttttagtagagatggggtttcaccatgttggccaggatggtctcgatctcttgacctcgtgatccccccgccttggcctcccaaagtgctgggattacaggcatgagccaccgcaccctgtcttatctcttttttataaacaaatatgagatctttaaacgcatactgtctctagattcccttggttgtgctgtttgtatatttggtgtcccatgtgaagtgcttagaaccagacctgatactaagcaagagcttaatgggtgatattattattactgctgttattatggttctgaaattgtagttctctgggtcagtggctaaaagtggttggaggaagtcttgttaaagtataacaaaatttactatctttcctgtttgcaggaaatctggaaagtatttgccactgattaggaaagctttttttagtataatacatccatcactgaatgggaaagcaggaaggggatctgccaatgatatgtaagaaaatactgtgggttaaaaaattatcttggtgtgaaatacagagttttatgcgttaacttttctctattaattcaggaaattgttttctggaaataaataacatttacagacaattgaaagtattgatagaaccacacagttgtttcaagctatgtatgaccatctattaacattccgggtgataaatttggtcataatttttatttgtcattgaggatgcaccatccaatgagattaccatttaatgattaaatatccaatatgacttattttatgaaatgatatagcatttcctatttagtaaggtaacacggaaacttatctagtataagacaaaaaccaggcccaatatataaaataatacataatacttgctgttaaaagctgagagaatctttcagtactggaaggcattgcctctctaaatttaagccgagaaattgttaccatagcaactcgcctcttatgtagttgtattattttgttcccttcataaaaattgctatgtattatcactctgtaaatagagacgatatgtttaaatgcatataatatctgcttttccttagttgtggaaaagtttataattcaggtgagtgaccatagcagagaatgtcacccaggaacaggaacatagagtgggttcttgacatttgtctggggtacatctgacaacctttacaaattccaaatttgagaatactactgtggcacaccatttttctggaatttcaatgtgcaccaagaggggaggaacataaagctacatgctcatggagatgttgggttcctcattggttgcccttcctgtaccagccagcatcctattctggtggaccagccttgcacagagtttgtcaatcacatttgtatcccagcaacattacacgttacttcgtgacataaacctgtggggttgctcaagaagagaactgaatctgaaaatgcctgagtgacgactagatatggaatttggcagggtactgtttagaatgggatctaatctctgttctgcagatttaaagtgcattaaggttaaagaatttgactaagtcacagagtgtctcagttttttcgtcttcatggtgtagacgttagctgaatggactgtggagcctgactcctagcagtggcatttactagctatgtcaacttggataagatacttggcatttctgtgcctctatttccacctttaaaatgggaattatggggaaggaagtgagagggagagatatgttaaagcagcgatcctcaacctttttggcaccagggactggttttgtggaagacaaattttccttggatggggatggggatggttttgggatgaaactgtttcacttcaactcatcaggcgttagttagattctcataaagagaacataacctggacccctcctatgtgcagttcacaatagggttcacactcccacaagaatctaaagctgcagctgatctgacaggaggtagagctcaggtgggaatgcgggcaatggggagcagctgtgaacatagatgaagcttcactcactcgcccgccccctgctcacctcctgctgtgtggccggttcctaataggccatagacagggactggtccatggccaggaggttggggatccctgtgttaaaggatacaaaattatagctagataggggaaatcagtgctagggttctataccacagtagggtgtctacagttaacaataatatgtgtttcaaatagctagaaggaggatattaaatgctcccaacacagagaaatgatggctgttggagatgctggatatcctaatttccccaatctgatctctatacattgtatgtaataaaacattactatgtaccccatgaatatgtacaattattatttgtcaacttaaaaaatgtcaaaaaccatactaaataaataaaatgggaattataattttaccttatatggctgtagtgcgaaaaccacgagtgaatgcataatgtactcaataaatgttagccatgatcataatgataaattttactctgaccttgaaaaattcccaaagctatggtgacatttttatgaacaggtagcaggggagtgtttgcatgtgatcaagggtgagtataaaagtatgtctttggtatatattcattcatttggtcaattgacattcaagaagtatttattgagtgttaattatctgttaggcactgagaatacaacaggaaaccaggtatatttagtgcctgtcaccagagagattatagtttagaaaggtatatcgaaaaataaatacaagattataaatagtatggttaagttagggaaggtacagggtgctccaggaggacaacgatataaacactaatgtgttttgaaataagatttataactttgctactcatcgtgtgtatcatggaccaagagtacagacatcacttaggagcttgtaaggaatgcagaatctcaggctacgccctgcaccactgaaatagaatctgctttttagcaagatttttaggtgatgtatactgtatgcaattaaagtttgagaagcacagattttaaacagaatgagcaaaaccataagacaattgaagcatttgtaaaattacctcagggctaattaagaaaaaatatttcttgagtacctactatgtgcaaggccttgatgcaaggtggatagagtctcagctgggcaagtgtttgtggattctccatggctcaaggcacatataacagccctaaggaaaataatccatcctgtgtggttcttagctcctgggcctggctcactgaccacacacagctatttgaaaagtctggttttcagagaagactgtattatgtaaaaattaagtcctgttttaataaacttgagacactatcaaaccctgaattatattcaaccttcatggaacgggagcatataatataacacaaggaagaggcttatataatgaaatgtatttaaagtaattggtctgtggaaagttgcatttggaaaccacaaatttagaaggaagaaagtaatacagaaagatatatcttattacttccaaatgcccctatgacttggatgttattgtttcaaatttaggaatgaggatgaggaaactgggacatagagagtttggaaacctgccttgggttacacgagttgggccaggatttgaagtgttgctctgtgagtggctggtttcaggagggaagttcagaatagctgaagtgcatgatgtggatggatgaaggttgttagaggagggaagtggggaactgatgaggaatgaggttggggaactgatgaggaatgaggttggggaactgatgaggaatgaggttggaaaggaaggatgtagaagtcagattccaaagggccttgcaagtctcataaaggagcagcttgaatatgacttaaatggtagccatcctatccaaacttcaaattcctgctttaaagtatttctggagctccttcatcttgcttgatgtagtgaagaatatagtcctggctcagctgccgtgacttaaacatgacaaactgtattccagtagaaactgattttggttgaggaaattattttaccctagagtaaaataatcaggaaaaaaaaacacttccttatatgaacttgtatcttcctgacaaacagcattcattgtctatagttctttttgctgagatacatttattttattttaatctttgggttagataggacacaatggactgtcctattttgtggtaagggtgcctcaccaataatctgttataaaaaataaagtattgcactttgtgaatgtttaatataatttaaaagtaaactcagattcaaaatgttccttatatataaccattatattagaattcttcttttttgagtggaagaggaagaagagttatttttagtatacatactattgtatatggaggtgtttcatgaatgacaatgacatttctcaagtatatcaaggcaaatgatcaattgacaaaaagtgtggtgctctgggagggtggggggactcattaaagaaggaatgagctagtggctacaggaggctacattcttttttttttttttttgacagagtctcctctttcacccaggctggagtgcagtggcgctatctcagtgcagaggctacattcttaatcctggccaatcatcttatactcaaagagccaggaaaaaagagtgtgtgtattagggttctccaaagaaacagtaccaataggagacagatagatagatagacaacataatttactaagggaactgactcacgggattatggaggttcttctgaaataaaatggaagttttgtctttgtgtctgcttgagtacctgctcaggaaccctgaacttagttctaggaatgcaacaaattctaatttttggattgctaactcagggttaaaaagaatcctgtacattcccactttattatcaaccaccttaaatgtggttaattatgtgaaattatggttaaggtgaggggtaaatatggagaaaaagaagggggcttccctgtattcactagacttttatttcgttccagggcttatgacagagcccaagagagtcagagaagctttctacaaattcagctgtcgcattcattttcttacacactagagttgccacttaaaaatactaaaataaaataaaaaattaatgttgaccatctaacaggaatacttgactcagctactaagttacaaatttgcttcatttttggaagacatctagcatctgagaattggacttttcccagaagttcacttggtaacctcaggtaagtcctggttcatcctggagaggatccgaggggaaagcctgatgggacccacggccgccctgagaagaaaggggtgctgtggggtgcgggaggaggaggagctgggaagcaggagcgcccgggactggatctagctggaaagggggcagatgctctcccggaatcagggtaggtaccctctaggaatgggacgttccgagaggggggtgtgtctggaacattggctaggggtccttagaggtgatttctgggaagggaaggtctggggcagggctgtgaggagtcaggaaagaaactgtggagtccgttcctcacccacttcctgagccctaggttccgaggcccccaggtcagggggttcagtggcgcaggagggtccagggcaggagttggtgagtcacctctcaggtccacctgtaaaggaactctgactcagagcatgagggtagcccaagaagcttcgacttcacccagagaaagtctgcccgccgttctgcccctggagcaggaggcaccgcccctctctcacccttagagccggcggccccgcccctttcctcccactggagcctgcggccccgcccccgcccgctcccggagtcagcggccccgcccctctccccagagtgggcggggccgcaattgcctgctcagctttccttgtgacgcctcatatccccctgggtgcgctgttgcctggctgcgcttcctttttctgtcatctttcgcatcgaccaatgggcttggagcatggaggccacgccccccctctgccctagttggccctggttacaccttctctggtcagtctcacagctgcgcggtggcagacaggacttgttccacagtggtaactgggatagagctgatgtggccccaaccccacctcccttcccgccctgccatgtcggaagaaacccgacgagcaaattggcagcagcaaagaaaaaggtacaagcgcctggtggcagcccaacgacccagccccaggtgccgtctgatggcaggaccacggccagagctcatgccactcccgaggctcactgggttgggcccccagctgcctctgggctccctctaccaaagtcttgtcagtgagcccctcccctcaacagcccagaccctgcctggagtgagatttgcttatttaccatgaaacagatcttgggaaactgaacttgacacttgaatcttcctcatatctcaacctaggtgactttgagtgccacagggtaatatggggcatctttctgaagcatcagtttcccttgattctcttgagagagaaaaaacgttcatggacttagggatgacagccccatagatttctaagagtataccaaaattcactctgaaaagaggcttgggttgtcctctttctgttcaattcccagatgtaacagaaaggctgccttctgccatgaggactcattgatgtaagagtttgagaggggctgctgcacttcctacactaacagacatgtgatgatgtgtgactctaaaccacacagtacccagttcctgcctacttagtgtctgtttttctacctctgcctctggtattgggccctggcagctgctgatttgtggcaaaaccccagatcttggagtcagaagacagagttcaagttcaattattgccttttttaagccgtggtatcaatccctctcagtcattaagtcattaagacaacaccttgtacagttgtttgtggcaataaatcagatggcataaaagaaagttctgtaaaaactgtaaaggcagatgtgattgtagggacttctcatgagaattcctgctcttcttttccacagttgagagactatcagtggaggaacagccctggtgttcctacaggagtgaaaaagaaaattaaaaattgcagtaaccccgagacaaccacttctggtggttgccactcacctggagatgtgagtcttggctggccaggctcctggggacagggggcccaagggcagtagagggtacttgttaagattgtggaagaactgttgggtcctggttaagaattctgggtttgaatcctatctctccctctgctagggatatgatgtagggcaaattgcttgagctctttgggcctctcttttcacatctgtaaaataagggtggtattgtttgacttacacttgtgaagcttaaatgagattagttattatttttatgttaatgccaagtacagggcctgccataaacacccaggacacccaggaaatggtagttgctgtttcattttcctcatccccagtctcaagggaaagccaggctaatgggaacagccacttgccatcaggctgtctcttttggagtgaccgaaagggcccaagggtgcgatgaggagagccccaagcactaagattgggagaagatctaacttttgagctcatctttgcctccagcgtgctgggtgaccacagaaaaatcacttcttccccttggcctctttaactcctctgtaagatgacactggataagatcagtgtctttcagacttgttttttagctggagcctcctatgttgaagtgaacccttactcaaaagtctggttttttaaatggaggtggaggtctagtgctctaccagatttatccccacatcctgggcctgaggagagcggtccaatgagagtattcagagcagcattgtcaggtgactccaccctgtgtgactgcaccactcaggggacttttccatctatttgtttctgcccctggcaaggcagcaggcagccatttggaaggcacagcccctggtcttgatctcctccgctcttcttcaacatttcgcttccctgaagccacctcttcctcctcccctgaatctcttgcctctctctaagcctcttctgtctttgtccacctgcccttgttctacccttttggcctcctgtggattctccttcctcccgctgccaagcatagcctgacacccacagtgccaactcagagagggaagagcctcctcacccaagcctctggagtccagaagacaggagctccaggagggccccaccctcacaccctacctttccagatgctctctccagctgtgcatgccgctgaggctcctctggtttgggggatactttgcctctggcttattttatgttgctgccatttcccttctgactgtttatgtctgcttcttcacctgtttgattgattgggtttttttccttcacccacatcttttattatcttggagaaagtgagacatatcttaaaggttagaggtaatttgggaataactttaagagcaggcatatggaatttggggctttttttcttagagacaaagtctcactctctcgcccaggctggagtgtagtggtgtgatctcagctcactgcaacatccacttcacaagttcaagcaattctcctgtctcagcctgctgagtagctgggattacaggcgcccgccaccacacctggctaatttttgtatttttagtagagacagggtttcaccattttggccagtctgatcttgaactcctgagctcaagcggtccacctgcctcagcttcccaaagtgttaacattacaggcatgagccaccatacccagcctgagatctttttaaaattatttaagtttttatttctaaagcaaagtaacttgacagtagagatctttattgaccgagttgtacattgagcctagccctagcccttttaaggggcactgtgtggaacagcctggggtccccagacctaaacttctcactcttcaccatccagttttcaagccggtgtgaagcccctgatgctaaccagcagttatgacaggccatggaggagcgggcacagctggaagcacacctggggcagtgaggctttgcagagggagggatgtggaaggaagatgaccccaggtggctaggagcaggagaggaccagtgacagtccttcctaacttctgcacccattcttgcaggtaatggaggcatgtagacaaatacaactggagagagatacatttgctgagattcttaaaggagagagagccacatggcagcagaggatgaatcagatgtcggagcaggtgagacctgacacttcagcccccactttagatctttctgggcatctgtaaaatgggaggggtggtcatgagtctgggctttgtggaggagagggcagagagggagatggtagcctgtccagccagcagcccccctctccagggccctttccccctgtgctttgtgcagatgcacacactgagggaggagaaggagtgtattatgaatcggttacaggagctggagacaagcttggtggaattgagaaaacagatgagtaagctgaggctggggtgacctgggaggagggctaacatcagagggccatggggggtgggttagaatgtcctagggaggtgggtggatggaaggactttgaggcagaggaaaagaggtatgtgccaggagatgacaagtctggttatctccatgagcctcagtttcccagtcagcaaagagggaggagtgcctattgtcagccacccacacatgtctgtatctgtaagtggcttagaagattggctaccatccaggtgtggggaatcattagcagggaggccaagtttgtggagcctgagaggagctgtggaccaagaggaagattttttttaagattccagaggcccttattgtctgcttttttttcctcagctgaactcccagccctggcacccccagcaaggccctccgaggtggagcagcagctacaagaggaggctgagcacctgagggaggagctggagagtctggcaggacagctccaagcccaggtacaggacaatgagggcttgagttgcctgaaccgggagcaggaggagaggctgctggagctggagcgggcagctgagctctggcggaagcaagtggaggcacagagacaaatcctgtagaccatggagaccacaccgctgtcagccacgtgctctcccagacctgtgaggtcaaggaacagctggccgagctgcagagtggcttcataaagctggtgcacggccccacctggggagccagccctcctccctagccctttgggcctttgttttcccacctgtcaaatggggccgtgtagccctcacgtgaaatggcacttctgagggcacctgtgagccagagccctgctccaatggctgtggggaggtggggatgatttttctaacctgacttcacccttcctggtgccatgggaggcagacaccaagttctgggctctccagctgcaatgaagttagcatcttcttcgcagaggtgccaaggattaaatgagataatacgtggagagaattaggcatgtcggacacttagcagatgatggctggctcctgcttttccaccattctgtggcctacagtttaagtggtgggaagaagagtgtgagatttcatgcagggaaggaggcatggggctctaggcagtctctcaggcctggagcaaggggccacgggcctgggcaggagacacagccctgcagtgccctaggtaccctattcataggcccagaatttgaaagcaggccaccacctgcaggtcttcctgcaggtagagatgaagagccaagaggctcagagtctgcagccgcagcaagaccagtccctgggtcccctgcatcagtacatggccacttgtcagcagctgagctctgagatggaggcgctgcacaggcagttactgctgcagacccagctcatggaccagctgcagcagcaggaagcttagggcaaagcgatggccgagatggcccaccaagagttgcgggggacccaggtgtgggagttgctgagggcgggtcccaagggggacgacctggcagcctctgtgccttcaactctctttccccgccccttaggagcacctggaagctgccagccagagaaccagcagctacaggcccagctgagcctcatggctctccctgaggaaggtacgggagatcactcagaggaagaggagggagcccaggaggaaggggggactgttagcagataggagtgaggagtttagaacagctggtcactatgccgaccgggtttctgcgttaagttcggcatcaaaacggtgacctgggagtagaggggccaccaggttgcctaaggatgggtgaactggcccaagtcagaaatgaagcaggtcagaactcccctgccgggcagtagtggaactgagcttgggcaacatagtgcgactttggttctcaaaaaaaaaataaaaataaattacagctgctcattcccctctggagagggactggcccagggttatacagtgacggttgaggcagaggtgggcccaccctacttcccttgttgggtcgcgtgaggacccctctagctctgtgccctaggaggtagactggacggagggtgggggagaaggaggggcgggggggggaggaggaggaggatgaggatgaggaggagaaggagaaggagaagaagaagaagaagaaggaggagaaggagaaggaggaggaggcgtctcggcccatgaagagcatcctgcaggacctggaaagccaggagtccatggttagcctactccccctgccccacctttgccccctccctctgtggtccctcccagacccgcttatgcttttggtttcctgctttcttatttctctggatcctcacccctttcctgggagccagtggtcagacagataccatttgacctgtgaccaacaggtgcacactctgaggccccaagcgaagggctcctctccacctccctgccccgttggtcctgtatatcccccaagaagaatgcacacctcttgcctgcaggtggcatttttaacatcagctgtagccagtgcagatggggagcaggctcggctccgtgggcagctgaaggagcaaaggctgcgctgccggtgcctggctcacctgctggcctgggcccagaagcagccagaggcagcagccccagccccagggactgggatggattctgtgtgtggggggacccaccgggccctgcagggtgccatggagaaactgcaggtgagtgagtctcttctggcatgggccaagaagggtgtgagcgaggcagttcactgccgagatgtgaccccattcttttggctccagagctgctttatgcagctgatgcaggaaaaggtggacctgaaagagcgggtggaggagctggaacatcgctgcatccagctctctggagagacagacaccatcggtgaggcggaggccagggcacggcagggggagctgcccagtgggtgaagggaacccagcgtctgagccctgtcctctcgcaggagtctacactgccctctctcagccagggggcagcgctgaaggagcagcaccgagaggaggaggagcacatccacaggctagcccaggacaaggaggagatgaaggcagggcgtggagcttctctgcccggcggggggctgcggggagggtgcagcttcaggcatggcagctgaacaccctctcctccaggtgaagctgctggagttgcaggagctggtgttgcggcttgtgggcgacaggactgagggccatggcagattcctggcagctgcccagagccctgctcatgagccagctccaggggccccagccccccagagctcagggctgccgacaagcagggtgatgagtagtgccctcaggcggtttgggcaggcaagagcaagggaggctggcagtgtgctcagagccctcctccctctctccaaagatctttgccaggtgaccctcaccagcagcgtggagcctgcacaaggagaggccggggagggttctcccctcgacaaccccagtgcacagcagatcatgcagctgtttggtgagatgcagaaccctcaggagcgcccaggcttgggcagcatcccctgcattctgttttcccaccaggctgacaaaaaccaccaggtgaagatcaccctcatctgaaagccagttgccttcagcaaagccaggagaaggggggtgggaggctccgcccccccatgtccctcccacccctttgcagtcacccctttacccttaaagtaaatggatttagccatactgcttggcctggcgtatcctgtttccctcactgggtcctggggtttgtgccactgaatgggggccccagaatgtctgagcatgtcgagctgggctgctggggaccttccaggcctgttacctgcatgctgcctggtgacacctgggggattccacaggtggaatggcacccatgggggacagtccggccctaatggccaacaggctcagaagcctgatctctcggtggctgggaaggcagggtgccagcacccaagggcactgactttcatccagcccaggcaacttcagtcccatccccctgtctgcctcacctgcctgtgcctggtagcctgttctgtgccttccgtccagcccaggcaactgcagtcccattcccctgtctacctcacctgcctgtgcctggtggcctgttgcatccctccctccagagtgcaggtgccccacaggctccctctaggctgagctcatggccctgctcctagtggccagaggtggcttccaggatgagccagctaagctccagggtctttccgggaaaagagttccttggaaagcatgtgaacttttcaccgcttccgacaaccatgaaagctctgagccaggtttagatgccgtaggattcaagggggcagcaaggggtccagagctgcagacagctgagggtgaccattggggtctgctcaggcaagatcctggagtaggtgaccacgtccaaggcaaactgtgactaaaaggaagtgctgggttggccagaatagaggaggctgagtgctgagaatccccaggggatctcggagggggcgtggaaagggccataatgggagggcagaggtgagaacagggaatgatgatgtcacagtgctgagcagcggggctggggacggagtaagtggaggtggagggagtagcctgtttaaacctggagctcatccctatgaacatgaactactggcaaaaaaaaatctttttaaaagaaaaacttaataaacttaggggtcagtaggcccttgataggggagaaacaagcctttaaagtgagcgaaacccaggattgagggtacgaggtctgtgctgaatctcctggattcaggattatatcccctgagggcccagccggaaggctggaacagacctgggcacctggaaagctgacatgggaaacaggtagcaggtgagacaaagtgggtccttgatgccaggaggagaagtgagtgctgggccttgcggccttgggtccatcctaggaagtgctggaggttcacacaagagccctgcctggctggggtttctgggagccagaggaggaaagttaggttgggagggagcagagtgggaagcacagctactagcagcctagagacttggagggagccagcagtctcggcttttagccaggaagggacttaggaagtggatagtttcctgggtgggtcatggtttggagaagtctagagactcgggatggtcgctgacctccctaagggatggggagggtgatctcttcacagaaattcatcagcagccctgaggtcagcgatccccatcccatgtcctgacaggtgcctcctgcagcccctccaccgccacttgccaggttctgaccctgcaagcacatgtgtaaacacacacatatgttcctgctttcctccggcagcaccttgcagggttctgagctctttattcccactcctccattttgctccctttcctgccataatttctctgcccgtgaagcctgctcttcttcagcagataggaggaacatgagctaatagggatgtgctgggcccaggctgcaggatcagtccccctgcagtcctgccctggggagtggggctgacagaaggtctcatcgggagatggaagcgcctcctcagcggtgctgtcagtggacatgtggagggtgacggttcacaggtcctctctgtccttcctactcctggcctcctggagggcaaagaacgagcctaacccctcactagaatccctggttctccagagggtgtggcatgtttgtggaaggaataaataaaggaatggccgagagtcctgcagtaggatgccacgggtgggggcacaggtgggttccagtaggaaaacggccagctgtgtcctggtctcagggcctccttcctttgatcagctctcatgcacatgctttcctttccccggttcctcttggcaagtgctgttgtgtcctgggcagcctcctgagtgaaggtgaggaatctccctcccctgagctcatccacatctaccagaaatttgacttcaaggcattctccttccaggcacccagccacgtggtgacagccaccttcccctacaccaccatgctgtccatctgggtggctgcctgccatatccattctgccttggacacctacatcaaggtgatgcacaggcctggagtttgtgtgttggggacagccaggtcccttgggtggagctgagtaggattgcccagagtgggaggaagaggtgatttggggagagcagcactctggggccctcatggaacaggtacctgtggagccaggaagatgggccgaggtgttggcatctctttcagatgcccaagaccttgtgggagccagagcatctcccaagagcatggagagcttgttcatgaacctggtctggttggtttggctctggctttgaccaaagacatgcttagtgctaatcccacactcctggctcagatggaaggacagtccacttttctctcccactgctagaagcctgcaaagcaaggacctgaggctccccgtggctgggcaggccccaggtaatcacgtgttgcccttggccctgcctctgctatgcacctgctccctgagcccagggctggggcagcaatggcaggcccttctcctttacttcctaacctggtcactggccatggtggcagcacacccttcctggaggaaggagagccagccaccaggttgtctgacagaggtctgtgtgtctacagagatttttttaaaacttgcccttttacgcatccctcctcctctaaatgttttgtaaacctggaaaccaggaaaatgacccattggggcttggaagtgactgttgattcattcatttaacttgtttattttctgtgcgccgggtgctataatgggcacaatgtgaatgaaactttggtgcatgaaacaggcatttacaatgaggtggtgaagacaggtaatcaatgtcagacaaaaatgggacatgtgctagagaaggagagggtgagaaaagtcagggaaccgacttaaacagaatgatcagggacaacctctcaggggagatcacctcaaggcagagtcctagaggagcctttggagaagaggtaagaacattctaggcagagctttggtctaaatgcagcaggaagtcactgcagtgttccaaccaggaaaataacacagttggagcagcgtgtgtgcaaggtgggctgtcccattcccaggcaggaaggggctggaccacagaactggggtgaggtagaggtgcttaggaggctgtcatgaatccctgtgtgagtggcagcggcttgggcaggcccagtggctgtggagacgcagacaagggcggagatttacaggcacttttggaacagaactcacagacttcaggtggattggctgttgtggggagaggcagtgagggagtcacagcgggctccacttctctctggcctgggcaggtgggcaagcatgtagtgatgcttttcactgatgtgtgggggaactgagggaggccctggttttggggggaagccaggttattgggctatctcaggggagctgcctgagagacatccaagttaggggtgtggagtgggcaatgggatgtgtggtctggagttcagaaagggctgggctggtggatatgtttggggacatcagcctgctggcagtatttgaccagctgccctgtgcctcctgcctcggtggggccaggtaggccatggacagcctggggcagcaagggctgggcagagggcatggtcagtgtggctggggtcagggaacaggacaggagagtctgtgggagtgggagcttggaacacttggaggatccttgcaactttgttcaccagagcaggctgggaaaagggacagggtgatgggaatggaaatggaagctctcccaaagtgctgggattacaggcgtgaatcaccgtgcctggccttccctctgcctttttcccactgccccatcagggcagaaggcagctgcagtgaggcagtgagcgccctgggactgggtggctgcattcttcatgactgtgctgtgtgtgctgagctgccttttcctggaggagaaggcggagtggacctggctaacctgggctcccttttcctggccataggaactgacatgatgagtgacacgagttctggaagcttggaggtgagccctggtagccgggagacttcatttgctaccgtgtcacctggggagagcggccgcggctgggaggatggtgacacctgcagtgagtgcagctgcagagagtcaggtgccagcggctcctcttttgaggagctggacctggagggtgaggggcccttggaggaaccacggctggaccctgagactgagcccctgggggctaccaagtggccctgagagcccagtaccctgagaagggcaaggagtaacccatgaccagccccctcctgcggggcagggctgcggaaccgagcagactctccagccatcttcctccttcttctgggggcgaggggttcccaggggacgtaactccccctgctctaggcctcttgtgaagccttctcctcactgtcctttaggctcccagggccaaagcagccaaagactgtatcctgcaccagccctgtgggccgacactcctgttgtatctctttttcagactgtcactggagcttccaggacccagaataaagccaatgacttacttgtttcacctggatttgggctgcgtatttgtttgacagtttcacctttgtggggacccctgtatagaccggccaggagtaggaaggagcctcccctccccaggacgaggaaaggagggaccatgccaaatactggggtcggggaggaggggtggtggagatcctccaagtcctgctctgtgacccccagcggccagccgccctccactgcagcactttttcacagaggtggttatatctctaggatatgttccttaaagtgggattgccaggtctaagggtgtatgtgtggccatgaacagggttaagaactctcgccaagctcccctcagtggaagtggttctcatgtatcctcccagcactgagacatgagagctgcaatgctctcgttcctagctttgtattatagaaattttaaattttcatacatagagagaagttgaaaaaaagcaccatgagcacccatgtaccctgcacctagatttaatgattatcagttttcataagccttcttcttttctccctccctttctattatttgagtcatttgtaagtcgaagacatcatgtcattttatctctaagtacttcaacatgcctcctttaaaattaagaatattctgttctagccgcaatatcattattacacttagaaaaagctaacaattccatagaattacctagtattcaggctgaaattcagacttcctgtttgtctcagctgtctttcatagctttggattttgttttgtttttaaatcagaaggaactgctttttagctttattttcctctctctcccacccaaatcactgtctcttactgcaagaaaaagtctgaccagttttaagaatgatgtcttagcgttttatattccttatctcataggattcactttggtatcattttacacattgggggactgccttgtcatggatagacatttcaaataatttttttctttgtgactggaaaaggttgactgggagatgttgttagacatcaaactaacagaatttcagggaccacaggtcaggaattttttaatggaattttctcctctaccctccgctccctgggcattctggttctctgttacctatattttgtctccaggttcccaggtatcttctcgtcagtccacaagcaacgtcagacaagtgtttcttcacccaaagacccccaccctgcagggctgcccaggcccatctctcctgacagcctggagatcatcagtgagcttcagcagtgggcagatgtggctgctgcctgggaatcccatcagagttccccaagtaccaatgctgccctgcctggcccccggcccaccttgtggactgcactgctgttcccgggacagctctcagagctgagcctggactcggtggtcattgcctccatagttccctctgggtgactggcagttctgtggtcataggcacccagtgctggactgaaggggccacaagtggaagttgaccataccatcttctcccaggagtcagcctgctggtggtccagcaagggccatctgccagcccctgtgcagctgcatgaatacaggtgtccagtctctggagggtttgccaagccacctgtctccttacatcataacctcaccaccccttcacctcctaagctggggacaacactctgtttatgggcagtgccccctcttactgccagctacccaatttgctggcaggtgcccacctggtgtttccagtgactactgaccctctgatgccagccagcaggccctgtccattcctcttctaagctacttccatcactgccagcagcccctccttcatgctcagcccttctgtgccagggaaaccacccagctctccacttccattctcacagcgactcctgactgagctgaggatgtttgcaccttttccttcccctgtcgtgccaagcaacctttcatggggcatgtctatctacccaggctacatgtccccatgggcaggctacccagctggtggcctccttccattccaggtgcctctatttcactctcatgaggttgctgaagtggggttcagctccagtgatgatgagaatagggacgatgatgtgatagaggtcactgggaaatagctggggagctcctctgctcttcaattggggtccccaggaggttgcccaccaagctggaaggcaatgatttggacttctccagaataggaaacttggcagaagagaacacaaaggggacaaaggagggtggttggccatggtggcagagctgtgttgctgtttaacaaaagaggcaaaaaaaaaaaaaaaaaaagcccaacagggcagccaacagcgggaaattgaagacccaaagcagggctggagaactgcgcagcctctcccactccctgccttgctcatgctgtctgcttgcttgctcgcccatcaaagtgcaaaagctcacatcccatttctgtctctaggatcattctttccaaagagacctgccttactgagtgatttaacttggcctggggaggggagggaagggaggaagagggaagagcgagtgagagaaggagggtgggcaggggagcaaactgtgatcccaggtgaagttgggtctttttatggggtggaaggaagctgaccaggcttgtgtgtttgtgagtctgtgtgtgttgatgtatgtatgtaacagagcaggagtaaaggtgggaggggagggagggagaaacaaagggggaaactgaaataaatttatctttcttctaatggaaatcagagtttggtcgttcatggcacctattagtgtgaacatcagggtgagcccaggtgaagaaccatggaaattacaagtttccttctggttgggggaagagaaggcccagctaactcaagtccctggttttaagagccacatttgtttgagaatttgggggaaatcatgagagaaaatgggcattaccaatctgcgtctcttaacccccatggctctctgtgagcagcgtggaaggttgtctgtgtgcagaggctgggagggggaggccctggagctgtggctggaaaagacatttttcaccggtgggacctgagcccccagctgcctatcctggtgtctttcctgttcctttccttcccctttagagagctccatgttaatttatttcttatgggcaattacttcttacttgggcttttcatgtgtcttgtttgtttgtgggtggggtgcggggaggttaggggaaaagagagtaggagatagagatgttttcagatatcccagactccatagctactggtgaaaaacaatcctgggtggatggatattgatgagggaaagagtctgtttgaccaaggtttggattaaacaactatatttttgagagattgcttttcagaaagatcaaggaatcctgagactggatagttagtgggaggtgagactcattccacagaaattgaaagttgggatcagagtttacaactgggaagtcgggaagcccagatttggagctgtgtcctcctgggatgatcttagaggctggctgtctatgctgaagagtgaagctgtgggtaggtggttgctgggttgagggacttttgatttcttgttaggaaatgtcttcggatgacccacatgggcctggtgtctgctgcctccatcttcaaaggaccatggagaagccctttctctgtaggagtcataagtttgggttttttcttaaaagaacacattagtcattctgggtctccccttattgccaatgccagggaagaggcatctagtccttaagtacaaacactggctgtcttcctattcctattagcgtccctaccccctctgcatcccccactccccataccccaaggctttaccagatggttctttatgatgaagaaagtctgactttagagctttaccacctcaccttggctccctccttactgggcagatgctggacttgcctcttcgtagcccagaaggcagcttagtcaggtcatccctatactagctcctgcagccctctgaccagcctggttccatcattggagggccatagcagactctggggtaagaatccagaaaaccttctcagcagggaactgaaaccagtcactggaggcatagatttgtgaaattgccagagagcaaatgggtattctgagaggcagcacatggctactggctacccatgttccagagactgggtcttgcttctcctcagcagaggccatcattctgggaggctcacctgactagagaaagctttctcttatatgtgcagtttctattgtgtagaggggtggaggtgggatcatgggaaattggagtgctaccaggtccctggtttttgcttttattaaaaaaacactcacacacaaaaaaaacaaaacaaaaaatgtggggccacgtgcgggaatgcagaggatctgactgaggaatttcccctcgctattgccttccatggaattttttcaagggcctctcaagccccatccatctggtttagccaagttctcagcctggggaatgcagtactacttaatgattcaggtttgccatttgtagtgatgcttgatttccttttcttaatatatttgtagataaaaactgaacagggacaaagtagctatttaagaaaggcaatgaaccatggtgggtcttatcattttctttagattggatatctgtgaagtcctcacccctctgagttatgctttttttcttttcttttctttctttctttctttcttttttttttttttttagagggagtctcgctctgtcaccaggctggagtatagtgacaaaatctaggctcactgcaacctctgattcaggggttcaagcaattctcccacctcagcctcctgagtaactggtactacaggtgtgccccagcacgcccagctaatttttgtatttttagtagagacagggtttcaccatgtcggccaggatggtcttgatctcttgacctcatgatctgcacatctcggcctcccaaagtctgggattacaagcgtaagccaccgcacccggccctgagttatgcttcttaagcgtctatctcatcatctcttgatttagggataattctgtctggtgcttggagacctcttccctaggaattagtgggtggagtctctatatacttgtgattcacagctaaatatgaaatttcccaatccaggaggagacagcaaagagctggggtaaagatgtgcagactggttgaaacacttagccaaacttaagcggcctggatgggaccatcactcccaaagctgtcagcagagaaacgccctctgtgtcaatcaattcaagcctggtattgctctgaaattgagtcctcatcccatgggggaaggtctctgggggcttttcattcctttatactagtgttctggatataacttcctgcttcccactttcttttttgatttctcagaagaccagtgtctccctctgaaccgtggccttctgtgcaccgagctcagtggctcttccccaccaaaactcctaagagaagtcatccctccccaaaaggatccccacaagatgttctggccctctgctgactgctccctcgaatcagcacctcaaggactgtttgagaatgctgtgctctccattggtcaccttcggactccgtttccctgctgccatgtgtattcttctcttctgccctgtgtattccatggtgacccccttaatgtctgttctgtgccactagcttggccctgggccttttatttatacccgagtcttacaacgaagagtgtcctgagcagacagtgtccaccttctttgctcttccgggtcctgagtgtgctcctttcccttttgcaggtctattggacatagtaatccggtgtgctggggaggggtagccaggccggctacagagtctgcaatgcaggggcttggggaggtttgggttctctctgccaccactattgagatgatattcagaagagagaggacctcatactgtgaccagacccaagacccttcctggaagacagctcagtccagctgtgtgtgtgtgtgtgtgtgtgtgtgtgtgtgtgcgtgtgtgtgtgtgtgtgtgagagagagagagagagttatgtgtgtgctgtgctcatgtgcacctgggtgtaaaatgactgttagctggttgtgttactcagggtgggctggggactcactggaagaatcccctcagtctgcccaagacaggttttttccttgtgccctcttcagagaggtcagggaaagagggtccaggtgggcaaaggcggagatgccacaaatgattaatcactaaggccagatggctgccaggaggagtgggggatgatgaggtagcccaagggtccaggcaactggctttggttttccatcttctttcctcaggatgcccctgaggcctgggacctgtgcctggctttgaggagcatctgtggcttggcgatccagctgctggggtgatcatgggcttccctcctctcagcagggccggagttcctggtccagagactgaacaactggctctttctgtgacatatttatttttacttgtgtttcatgtcacttttttgaaaaaaagcaagcagaacaattgttaagtcagtatagctgcctatcggttttccttatttctctttttgtaaaataaaattaaaactccagaaggcagtgttgtttgattgaggaatggtctggacactgggttggctgggtgctagtgaaaggaatagatcttagaacacagtgggctctgcgatagcccttgggtggtgagacaggcaggaacagaaggaagactgctggcagtttctttgttacagtggggttcactgggctttttctgcttttgtttacctgaagagggatgtatttccaggctccaggggaaacagcaagctgacttcagagtggcttgaggctagctggtcctcagccatgacaagtcctgcacggacagccctgaccagactgtgaatggcggggtattgggtgcagtgccttcagagggtgggagatggttgtaagggataattggaaggacagccaagaaaggaatgaggccaatagacccaagttcaggcaagctgatttattgtcagtcctgcctggctacctcttgacaaaagcagagaaggcagccccacttataggctagagcaaggttttataggacatagaactggatcagggtgaaggaaaaagaaaagggggggggtcctttgtgccatgtgtctgaccgcttcctggagatgtttttcttgccagttctcttgtgcaaagtagacgtcttaaccgcatcctgggacagctggcctctggtcaaacagttacaggcaggtttggggtagcgggttttactttttggcctttggggcttagtctatgggagggggaaacagtccagttgggtggaccttagcaatggtgtatctgtaagtggctggtggcagcgacaacattcttacgctgcatgtgtattgttcagttgtcatctgtgttggggaatctagccactggcccacagagagttaaccagagcttgggagtgtgagaggtgggaaagagggaaccatctactccagcttcctgtctaatttcttcaaggggaggggccctggggaaacaattccttggaaatgtacaaaggaggatagagaaagaatctctgtaggaattccttgggcagaggaaggcaagaggacacccaggtcacgtcagggctcatgatagggaaatctgtgctatggggagatgggactgggagtgaagggtgggtgcggcagatggctgggccagcaggtttcctgccacctgttaaaagggggtgggggtcgggtaaagaaagtgccttgcagagtaggctgctgcctcccggtggtcagccgcggccttgcatggatcttgccaagggagtttgcttggcggtgttggaagcggcctgagatgaagctgggcgggctgatggcctgcttcccccgtcaccggcagactctccttccacgaaagacttgctgaagctcctgaggcacatgctgaactgtgatgtgggactctggagttccccaaccacgctaaaggaagtgagcagagaggacaagatgaagaatgggcgcctccttataacggcttcctgggaaaagctcaccacttgatgagaagcagaactgaccagcaggccctgcaggcagaggctgtcagtctctgagccagtgccatggccctctttgtgtcaaaggaaatgcttccaagtgaatagcctgcctgcctagggcacctgagctgagcgtttgaccgtgtcctgggagttcataggtaaaataactgccgcgacctgcactgacccggaccggagtgcctgaaaggggccagctgcctattccgccagtccgcctggagggctgggacaggcttggtcctgtggacgaggttccatctcccctgcctgcggaaggaagaacgtgaagcacagagaaaggaagcgggatgatgactgcccctgtgtgcccagcctgctctttgctagtgcagtagtgggatccacaaggtcaaccaccccatgattgctgactgtttccaccaccagtttcctggtgttcccatctgcgggatcctctcccatcagtactggtcagaataccgaagtagctcttagcctcgacggtcttgtagccaagcttatgaacatcgttgtcaccttccccacctcccaccaaaagtctaggactgtcgcgaggggagggttttatctctgggcccctggcagagtgctttgtggtttatatgtcctcagaaatttgaagggaagagtgaagcgatcatcaaggagcttacacttgacctgggagtcacctaagctatcgctaaccagaaaggtagaccagcctcccccagccaccaccagggcactgagggaggagcctggaagggggcatgcccctgggatgtggactccaggagggcggagccttggtcttattcactgtatccccagcccctagaattgtcctggcagggagtgatcataaatgttggatggatgaatgtgctcacggagcggggaggggtgggtggaggcaggaagcagatatttggatccaccagcttcttccgtgagcccagactgggcttaagcttcctcagctatgccttgcttggttcccaagtcttttgcgaagccataatgagagaaagtggcaggactaacggtggtacaaatgccagaggcggatactgctgtgccgtgtctccctagcctgtgcaaacgctcctcctcagcctcagctccctggccccagcctggccctctcctgtggacccccgggctgggctgtcactgaggtgctccggctgacccagatcccctgggtgttgctaaatcaacctcggcaactgtagagtttgctgaaggcgggaaggtagtccgagggttccgccccagccggctccagggtcaggcgcacgcccgtggccatggagacggggagaggaggcctcggccctcccggtccagcgcattcagccaaggctacggccacagccacgtctagccagagagggggcggcggatccgtgtgcgctgcgggcagtggtggaggcggggccgggccggaggcggggccgggccggaggcagggcgtccccactgcagcgtgggtctgggacaccagtccacccctgcgcgacctcagggcccccacatcctgaggggaccggctgctcttggcctctcgcctcgcccatcgctggccccggccgcgtcccagggcctggatgcgaacttggggcagccctcacccttctgggcagtttggaaggtgagaggaagagagaggtggttactaaattcccttcaggggacaggaagtgctcagctgagatggcagatcagagtgagggctggtcattcccaaggcaagtggggggcctagatgctaagagttttgcagctttgggctcagagacgtccaacaaagattaaattcttgagtctttctggaagccagtcaccagagaggagagagaaagcggaaatggggtcctggagtccgagtgtctgggttcatgttgcctgcattttggtccacatggctctgtttaatacctgtgtgaccttgtgcaagtctcttaacctctaaccacttgcacccttagccatacctatcttgtcggattgctttgaggatgaatgaagcagctgtgtttcaacacttagtgcctggtgtatagtaagtgctcggtagaagatttctcatcattatcatcaaagacaacaggaatgaaactaactggagacaagatgagtaggacaggcagaaaagagagagagatactgatgggtaggagcatagatggctgagaccagtgggcagcacctccatgtcctgacactaaaagtttagaaatttactttgcctctgccgggtgcgatggctcacgcctgtaatcccagcactttgggaagctgaggcgggtggatcacctgaggtcaggagttcaagaccagcttggctaacatggtgaaactcgtctctactaaaaatacaaaaattagccaggcgtggtggcgggtgcctgtagtcccagctactcaggagactgaggcaggagaatcgcttgaacctgggaggtggaagttgcagtgagccaagatcatgccactgcactccagccttagcaactagagcaaaactccatctcaaaaaaaaaaaaaaaaggcagaaagaaaagaaatttactttgcctctttgtgagcaaatactgtgtgttcatcgactccaaaaataatttttttagtgtaaaatcaacacccagaacccacagggaacaaataattccacagagctaagttttccacaaagctgcagtgtggccttttcagcttcaaaaccttttaaatgttaaatattacttttaaataattggggtgggaatgtacccccagtgggtcacatgcttcccttcctctttaaacagttttctctgtgctataattcccccctctccaggcaactcaggtcaaggcctctgtgtaagagggttaggcctctggccccgagctgcctggagacctaggcagtctgcccggaatagctcacacaatggttctgtgttgtgttcctgggcccgctcttgaacagcttcccttcctctatgcgtagctgttacttcttcctgttgtgagactccccttctggcagccttttcctcttactcttcactgtttcttctatgggctggaaaattgagatgaagcttgttaacatgggtgattcaagtctgggaagcttaatgctgaactttgttctagctgctcaggccattttgctgtggtcttccctctggttctggatgggtgagcttgctggagagcaaggtccctgcaggtcagatgtacttagcaaagaagagtttcctaagaaattctctttcctacacacatttccccctggggggatttttttccctctgggttccctgtttgttgataggtgtttggaccctggtattcatctgtcctccctctggcagtagtccctgaggtttcgggaggctgggctggcagtgtggctctgctgtgggaaggaagaggtattgtggaggaaaggcaggctggctggcatctggtatatcttgggggagacttgtccaggccaggagtatgtccctggatgactcactcctgtgcccctctgtgactcagtttcccccggtgtgaccagggcttccagctgacaggtagagctgttctgagatcctcacctactgtgtttaagaaataaagaggcttgtggcttcagtcatcctttatggctctcttctaggtcactacgtgctctggcccctccacctcctgggtcaaagcacccaaggcagggctgaggaggttgggccagaaccggttggcgggcaggtgggcacattgtcagagatggctatcagcctcctctcccttctttctctgttgcagctgccttggggtgcggtgcaggggtccagagccatttcggacctgttactactgggcctcacaggtggcctgactctgttactgctcctgacactgctggcctttgccgggtactcagggctgttggctggggtggcagtgagtgccggctcaccccccatccctacaagttccatgtggagccctatggtgaggctgggtggcttttcaccagagctgcagcatctcccccaagctctgctccatcgctgtccactaggacaaccccacatggtaaggagcctccatggggttctgccccacggatggacctagtgggccagggcttctttggggagggtagttttggttgctgaggaaagggtggaaaaatcctcaagctggccctgcaggcccctcctctgtgagcttgaagcacctttcagatttagcctggacttctgctccaggaatccatttgcaggctttctacttgcctgggtctggttccccttgaccatggctactcatggattttcaaatgcagtggatgataccactatgagtccctagcttctgccaggacttcagtcccctgctgcctcttcttgtcatccctctttccatctccatttagggccagtcctgtcagcccaagccattcagattctggccactctctggggttacatcatgctgtttctgtgctttccacccctcagctctcctgctgtagttgtgggctcttgagggctaagacggcagggttggggggcaccagaatggctgaagaggtaagattccatgccccatacccaaggtatatggcatttccttagacctcaagctgcctagttgggagagggcctgggggtctagtggaaccagatgagcagctcagaatgtccagaacactggagtcatagatgaacccagcatcattagcaccctatgggcatcaagctgttcttacaacctatggtgagtaaagcttgccaatgtagcctcctgctatgttatagggtagcgctgccacagctggatggggctggcagttctgccaagggttcttcagcctctaatactgagccatgccaaaccaagcactaggaatccccagttctgactttttttgcctggaaagctcaagtggacaagccctacggcctacccaatgtctgctgacccggcacttagttgaaacagggtgtgctggttccctctctgccccaggttctgctctacacctacactttggagatgaatcagacctagccctgccctcatacaatgggataatttaggaatcagagagaccgaggggttgaggaggatttattattattattattattatttaggtgaactggcccagtcagattaacatccaaaaaagactgagccccaaacaaagagtcaggttaccttttaagcattttgtggggcagggggagatctgtgcagagggaagcatattacagaagcgagaaacaaaaacagttctttaattgagacatgcattacatcatttcttacttttcaaggaaaaacatgttttacgacttgagtttatctgtctagtgaccttgcagctgcacagctagagaaacagggtcttcacaatgcctgggaaagggagagataaggctcactagccacagactgaaaaacagacagttgatttttaaaggagtccacctctttctcttcctcagggggaattgggttttctaacatacaactgagtttttgctgacacattctttaatttcttttaattcctgttctagtataagaccaagctgtgcccccaacctccttggtcacgtgttgtcaggacctcctgaggctgtgtcacaggtgtgtcctcaactttggcaaaataaactttctaaattgagacctgtctcagatacttttgaattcacactactaatttcaggtagaattttaaattcttaacatagaaacaaataaggccaggtgtggtggctcacgcctgtaatcccagcactttgggaggccgaggggggtggatcacgaggtcaggagtttgagatcagcctggccaacatggtgaaaccctgtctctactaaagataaaaaaaaaattagccgggcgtggtggcacatacctgtaatcccagctactcaggagactgaggcgggagaatctcttgaacccgggaggcggaggttacagtgggctgagatcgcaccattgcactccaacctgtgcgacagggcgatactccgcctcaaaaaaaaaaaaaaaaaaaaagaaaaaagaaaaaaaagaaacgaactagttaaactgagaaaaattaataaaagtatgctcaaatttactgacagaattatgggtaaatctaattagattctatccattttaagtaaataagaaaaaaaattacgaaggagcctttacctttgggaaatgaaaaaaccgcttttgaccagttgttccccacaggtacacaccccagttcccagccaagccaggacggcctgtcccggtgcctggagggcagggcccctgcggtctggggttggggtttgtgttctggctccgcgcggtggtctggaccgcgcccgccctgcctgggctcccagccggaaggacggagcggttgcggggcgggcgggctgcgagccacacagggtgcgggcggggcgggcggggctggggtgtcgggggctcggattcggagccagctctgccgtggggcgggctggggcaggcttcccgctctgggaaatttgcccctgctctccctgccagttgcggtcgtgggcggcctcgccttggagccctggccacggagccgcacggggcggtagagaggctggtggggagggaccagcgggcggtggaggggcggccctgcaggcgacgcggggactggaaagggcgcctgggtgggaagaggcgctggcgggtgatcgtccccaccgggccagtccccgggatctgctgccgcccctctccgaaattcacagccagagcgggcgcactggtgtgtgtggcgcctggagcgctagggtccccacccaagtgcgaggcccccgcggggagcccagcccaggggcgtccacagtccaggccccagaccccaggtcctggctagattcgccaaagtcagaggctggaatctggagggcggatgtgagggtgccagctaagcccagcccctgcccggcggtggccagcataacgcggtgacactctctggagcccccactgccaccactctgctgtcaagcccgctgggctaagggatccgtctgcccctagaggtgcgcacccaacgccaggcagagggagctggcgtggggctgctggcggtcaatgtcacccgagatgaggaggatcttctaggaggggccccggggccacagaacgagaggggagtgtgcgctgagcccaccttgcaaagacgctctggtccccgaggggcggcaccttcggcctccagccaagtcgccgagcgctcccagtgctgcctgcccggcacctgcactccagactccaggctgccaaccaaagaggaagcccgccccctgggaacaggccactctcagcttgggcgagggaagcacagacacccccatccctagcctggcagccacacacagggaggccatcacctgacgattgcggggggcctgagttattgacaggtgaatatgctgggaatgaagactcctgggcctgggagggaggggcggtggtgtggagggcggtgaatgcctggacctctgggtctccaggctgccagcggcctgaccaggctcccggtgtcctcctccaacctcagtttccttacctgtcccagaggagaaatatggcagggctgtttcggtgattaggccggataatcctggtaaaatttattagcctgcctggtctggatattattttttctgactttgttaagaaactttgctgcccaatgtctactcttggaaagtgagttggggaggcaggaagtcaggactctcacccttggcttcagagtcccttccaggtgccccctccctttaggctcaatgaaagcacagagctggcaaaattcccttacccaagacagctgtagagtccagaatcagaagatcttgttttctgacccaaggaccgtttcttaccccaaaatcgaaatctctttgagtggtcagcttcagacaggagtctgaatttgattgtttttctctagggttaacccaaggcccttatgataagcgttgcttcatccccattccaccccttttcctgccctaatgcattgggggtccttaaccgtagtgacctggaattgggagcaagtttccccaggcggggcatattggcctcctcaacaggctggcctggccttggcctgataaacatcagtcctggggcaaaagacccagggcagggagatctcccccccacccccactttcacatgctgcagtcatttaatgggctgtggtgacctatcagggtcccctagcctgcaggatggaatttaactttttgccatagagggggaaactgaggcacaaagctagtgagtgaaaaaatcagaaagactctgtgactgggaaacactccccaggaccaaggtccctacaggactcagccccttttgggttgtgccagtggttggcatgtgcaccctggttgtcgtctgtacctttctggggctgagggtggggtgggtgttctggcaggacaaggtctgtgacccacgggatagagagacattgccctctttccctggccttgggcagagcaagagttctgttctctaatgtatgtaaggaccagtgcctgtgtgagtggaggtgggactccttttttcttgattaaataaaacccttcctggggctgcttaggggattctggggcttgtgtacctgacagttgggtgtggcatctgggtactcagcttgtctgtgccttgctgtcacttctccagggacagccacacacttctctcttagtccccacacatgcccagtcccttactttttcgcctgggatccccctgcctgaatctctcaacccagccactgctaggtctccccagggaccctgtaatccccgggatgggattgccggaggcggtgaccctgctgcctacctctgtctgaagttagggtccctggcctctgcctgcacctagtggacagggagggtgaactggtcaaggataggctcttggcctagcacagggcctttctctgcacctcaccatatagtggtggaggctccaatcatggctggcctgggaattgctctgcattgtgtctcagattgcaggagataagcagatccgaggagaggagcacatcctgaaagagaatctgaattttccaactcagctgaaccctcggcccctgcccttgaacacacattctggttttcttaccaagtccctgcttgttcctgcccacctggccttcccaggcaggtgattggtgtttctgccccatgtgtgctttggctgggagggtcactggtgggccaccattcagaaggcaattaaatcggcctcattatctggggtgttacacgaagttcttggtctcacagccaatgaaatcaagggtgcagacactccaaaggtgaggttagagaagaatttaataagtgaaaggcagaaagctttctggcacagagaggacccccaggaaaaagagttgcagttttaaagtgaaaagcccaagggattttataaacaagctggtcgggagaggtggttcatttacataacgtgtgaaaaaccagtcaggactaggtgtgtcattgcgtcctttgcataaggtgaaaacttctgacagtccccactccacactccaacattttttttgttttgagacggagtcttgctctgtcgccaagctggagtgcagtggtgtgatctcagcttactgcaacctctgcctcccgggttcaagagattctcctgccttagcctcccaagtagctgggactacaggcatgctcctgagtagctgggactacaggagtgctcccgagtagctgggactataggcgtgcaccaccacgcccagctaatttttgtatttttagtagagacggggtttcaccatgttggccacggtggtctcgatctcttgacctcgtgatccactgctttggcctcccaaagtgctgggattacaggcatgagccactgcgcccggccccactccaacctttctagtgtgcctgcaggctccttagcgtgagttactccatgttgcttatctcttcctaccatgcgtgtgtaagtgtgtgtgtaaaaagaagtgggtggcagaaccctccaaggtaaacgtgcctgattcagagtagctcttttttatcagtgctgttgcaggcactccccttgtgcaagcctccttgtctgaatattttcaaaaagagagagaaatttgctcactggggtcctccgtaggtcagtgaaacttgctgatcacatagcagttcctttctgtgttagaacttgcctccattatctgcgtttccagcctgatcttttgagctctctttgctaaaacagaaatgacctccgggattgcttttccttataagagaagctgctttttgttagaagggaattctaccaaggactctcaccctatctgtctagttgatttctttctctcccctctctaagtaccatctggtagtgggcagcactgagtcattgtggtctctccacagcctgctgggctctctgcatccccccaagggtcaccattatccactcttggagggcagcgcagagctctgggaggcgcctctttctagcttccgtccatactctcatgtgtgtgtcagggtcctcctctgagagattggggtatctctgcaggcagatggcagtgaggtcaccatggggggggctacctcccccctgtcttgggcccaggtcttgggcccttctgagagacactggcccagccaccccatgaatcctcatggggaggaaggcagctcccatcgcagccttcaggaagaggaaaaactagttgggctgtgagggaggggtggccgcagtgctaaacaccaggaagaagaggaggccgggcctgcaaaacttcattcttagtaggtgcccaccaggtcctactaaggtccactgcacagtggcaaaaggtctcagaatctcataaatggacaccacccaactgccttctaggctcttggcactgtggacatctgatttctcccttctggtaaactgatcccaaggcctgttctggctccttcaaccagctgggatgcccactgggtcctccctgctgggcttgccctgttgtgcctccttgagagggtgagaacttccctggaagattccctcattccctgaagtcccccaagccaggtcgaagcaccctggacttctcagcagcagcagcagcttggaggaaggagacagaggggaggagacacacagcccagctctgacaataaccaggatgtggggggcatggtgttgatgctcctgggagccttttttagcccaggaaagagacctcaaaaggccagcactctccctacacaggagaagaaactgaggcttgcaggtagacagaaggagcctttgaaatggggttgacccagataggcctccgtctcccacttctcttatggccttcacatgccaggcccctgactggactcagacccagtagataagaagctgctggccaatccaaccacccaactcattcacttcaactgtccagacaccagccatcctacttcctccatttcctggatgaaaaactacaagaggtttcataaaaagcatcacatcaggacatcaaggttggcctggtggcaagggtgtgacccttggacttgtgagcaagtggtggtggggtctaaggtagggggctctgcagggcaggacctgtgatccagtcctctcacctgagcatccacccacagttgcgacattagccgtggagcctggttatggagagcgtggtggagaataagttcggcagcatcctgcagatggacatgatggacatgctgggtgagggctgcaggcaggctcaggcagtgaagaagccggccagccctcatgtgcccctgcagagtgctctcctcactggccattctgcatacatggctgctggtcaaccagactgtggtgctgggcggtgaggtgaagctccgctgtgaggtgtgcagggacttagcatttggaggcgaacagcagcaaggtgggcaccaatgtcatgccctcctcaccatgctcaaggtgggtgctgctgccagctgggtgcaagtggtaggcaggctgtggggggggctccacttcactgaaatctaccaccattatagaagttttagagtagcctgcaaaagataaatttatggcacagccagaagacaaaatcatctgccgtgagcagttctggatatgaacttgctgctggttcataccatcttctacgaaccatagtctaaacttagatgcagttttttgtttttttttttccgagatagggtcttgatctgtagccaggcttgtgtgcaatggggtgatcttggctcactgcaacctctgcctcccaggttcaagcgattctcctgcctcagcctcctgagtagctgagattacaggcacacgctactatgcccggctaatttttgtattttcaatatagatggggtttcaccatgttgaccaggctggtcttgaactcctgacctcaggtgatctacccacctcggcctcccaaaatgctgggattacaggcgtgagccaccacgcccaaccaaagcagtttctcttaaagtaacaatatacgtgtcagtcaataacagtgggaatgactcctgtgactactgtctctcgtaatcctttcaaaaacatttgcttctccctttgcaaccatatgctctatgaattcacacactgagtaaagaactctttggtgagcttatcatgaatctcacatactaaacaaacataatactgtattaagatctcctataaaatttgagcaaagtctatttgaataatagtagatcagaaatgaaagaattatgttgagctttctggaagatgtagaattagttattttgtgtttatgagttctctattaacctacatttgttacttaggaatatatatattttatagaattgggtgcgatggctcatgcctgtaatctcagcactttggaaggccgaggcagatggatcacttgaggtcagaagtttgtgatcagcatgggcaacatgataaaaccccatctcgactaaaaatacaaacattagctgagcgtggtggcacatgcctttaatcccagctattcaggaggctgagatgtgagaatcacttgaacctaagaggcagaggttgccctgagctgagatgcaccactgcagttcagcctgggcaacagaaagagactctgtctaaaaagaagaagaagaaaacaaaaggttaggaatatatatgtttcttattctgtgaagtttaaacggatgcacttgctcaaaaaatgaataaattttactccaaatttttgcattcttcaatgcatcttgtctacaataattattactgtcatgtcctagtggtgattttctattttgcattatctatctacattgattagtacttggaattttttaaagaagtctcttttctcctatgttttttctttttaaaattattattatttttttgagacagagtctcactctgtcgcccaggctggagtgcagtggcgtgattttcaagcaattcttctatctcagcctgacctcctgttggccaggctggtcttgaacgcctgacctcaagtgatccacctgctttggcctcccaaagtgctgggattacaggtgtgagccaccatgcccggccattttgggtaaaatttaaaggagaaacaatgtatttatgcagactcaaaggatctgcctccaaatatttataaataccattttatcttaattttttatgactgtttaaaaaaattataacagtactgtgagatatataatgtacagatgtaaaatttatgaataatataaagaattaaaaaagtaattaaaactctccaacagcaagttcttcacattttagctttattaaaatagtacagtgttaactttaagtagattgtaatatgttaaagatgtatatggtaatccctgaagaaaccactaaataatgtaaagaggtgtcacttaaatgttgataaatgaattaaattaaatttcaaaaagtatttgtacaaggatgtttatagaccttttagtcataatagcttaaagcagaaaacaacccaaatgtccgtatcttggaagatgaataaacaaattgtaactcattcatgcaagagaagactactcagccacagaaagaaacaaactactgaagcacacaccctggatgaatctcataaacctgctgagacaatcttgaaataaaataatacatattgaatgatgtcaggcaaaatgaaccaatggttttaaaaaaaaaacacaccaacaaatagccttcattgacaataaaatcatctgggaaaaaaagcatgaggaaattatttgagaataataataatattctatcattctattctagattccatcaatagaataaaaaaattctatccattcttaaaaaatacgaagactatatatgagtatatttacatgtcaaaaatttttaggatttgtgcctttcaatgtttgtatatttgacctcacaacaaacaaaagtgaaaaaaataatggagggtggacaatgtgttgaccagaaatgactgaagtagagagctataggtgaaacaagaatgagacatgattaatagttctcgaggcttcatggcaggtctattgaatttttgttgttgttgttgtcattgtttttcatatgtttaaatttttatataataaaacacttaaataaaaacacaaaattgatccacaatgttaactcttaagattatggttattgtctaagaagaaaaaagaaagtgattgttggggcatgaatgaggttagttttattttattttattttatttattttgagatagggtcttgctctgtcagccaggctagagtccaggggtgcaatctcggcttactgcaacctccacgcacgccaggactcaagtaattgtcccacctcagcctctgcagaggctgggaccacaggtttgcaccaccatgcctggttcttttttgttgttttttttttggagggagaatctcaccatgtttcccaggctgatctccaactcctgagctcaagcaatccacccacattggcatcccaaagtgctaggattacagacacgagccacagcacccaacctagtttcattttctgattacagaagtgtatttctttttaacaatgcattcagctttacataaatgaatgctttgtgcatacatttctgtataaatgttatatatcaataaaaaattatatagtactttttttgttgttgtttgttttttgggtttttttttttgttttttttttgagacagagttttgctcttgttgcccaggctggagtataatggcgtgatttcagctcaccgcaacctccgcctcccatgttcaagcgattctccttgcctcagcctcccaagtacctgggattacaggcatgcaccaccacgcctgactaattttgtatttttagcggagacagggtttctccatgttagtcagggtggtctcgaactcccgacttcaggtgatctgcctgcctcggcctcccaaagtgctgggattacaggcatgagccatcgcgcctggcccatagtacatatttgaacaaaatgctaacttagtatctcagaataatggcaacatttttttgtttgttttatggtggaacacacacactcagggcataattatacagcttctaatattccaaaaagagtattcaagccctttttgtttgtttgtttgagacagaatctcgctctgctctgtcgcccaggctggagtgcagtggcacgatcttggctcactgcaacctccacctcccgggttcaagcgattctcctgcctcagcttcccgagcagctgggactacaggcacgtgccaccatgcccggctaactttttttgtatttttagtagagacgggggttcatcgtgttaggcaggatggtctcaatctcctgatctcatgatccgcctgccttggcctcccaaagtgctgggattacaggcgttaggcaccgtgcccagccaagccttaactcctgaatgagaccatacgtctttttattttagccccaattcggtacatggcatgtttttaattttaggggaatgcaacctttattctagaaaatttttccctcacagtaacgatcaccaatgtcagggcacctacattggccaatgtcagggccttgtgtgcactcagtatatatacaactgggttggttcaggaacaaaaccaatagcgacgttggttgtgcatagaacaataatttggtaatattggtaagacaaagccatgacttagcggcaaacattttttcattcatttgagaaaaaatttgcaactagtcacctaaaagtactggtttacagcactggcatttgaccttggctgcgctctgtcatcacctagagatatttacactattgcccaggttccattgcaggaattctgatttaattggtatgtggcaacttgtgtttgggggattttaaaagacctccgaagtgatttttacatgcagactcgggtgaaaacaattggttcagggtgagggatgtattcactgtgtgtgatttccaggtgtgcttctggagctttgccccatggctgcttctgactttgaaatcttcaacagcagctctgccattgtaaaaatcaaaatgcaggccaggcagggtggctcacacctataatctcagcactttgggaggccgaggcgagtggatcacctgaggttaggagtttgagaccagcctggcaaacatggcaaaaccccatctctactaaaaattgaaaaatcagctgggcatggtggtgcacgcctgtattctcagctactggagaggctgagacaccagaatctcttgaagccaggaggctgaggttgcagtgagccgagatcacaccactgcatttcagcgtgggaaacaaagtgagaccatgtcttaaaaaaaaaaaaaaatcaaaagacaacttcaagatgtactcaaatattttgctaaattgcagcagaatgaaatgtcttccggctggggtcggtggctcacgcctgtaatcccagcactttaggaagctaaggaggatggatcacctgaggtcaggagttcaagaccagcctgggcaagatggcgaaaccccgcttctactaaaaatacaaaaaaattagccgggcgcggtggcaggcgcctgtaatcccagctactcgggaggctggggcaggagaatcgcttgaacccgggggcggaggtcgcagcgagctgagatcgcgccactgcgctccagcctgggcgacagagtgagactctgtctcacacacaaaaaagcctaaatttaaaaataattattctattcttttcatgtgtgagcagccatatagtatattatttacaaatatatgagaccttacacacaacgttaaaggcaaacaccttctgcggtgtgcttggctcagctcaggcaggaagccctgcctgaaaaggctgcaccttcggctgtcactctgtcctcattcggcccagcgtttggttacatcttctgtcactcagggcctgagggcggggggggggggggtcttaaacgttatccattcagcgacgctggcctgggaactgtccaatcaggcacgcagctggagcggaaagggcggcttccgggatgtggcggggtctttgtctctcgctgcagtcggagtatggtctagtgttcgctgttctgcgtcctctggtcctagaggcccatcctctgtggccctgtgacctgcaggtattgggagatccacagctaagacgctaggaccccctggaagcctagaaacggtgagagtgccgggtccgacatcccgagagaggggaaggggctggttggaaccggtggcaagaggctgtggcgggactcaggcctccccgcagtcggctccacaatctgcgccccaagttcgccttgcccagcccagcctcagtccccttcagccatcagattggcggctgcgctggcagccggacccccgggcgtcctgtctcttccctgcgcagtgacggtgccctggcctggagccctctctgggcagctctgcacccgcagcgtcgtgtctctcccagattgtgcagggaccacgggagggtggtcaggggagaatcctgactcggggtgcgggttcacgaatgggaagagctttggtttggtttatggggttcctagttcctcttttcttctattaaaaatttatgggagttatcgcgaaaatacttaaaaatttaagcaaggagtggttcaaaagttatagagcacccagctgtgggttgtagtttgtggtcggtccatgggaggatcttgaaggaaagatgcagatgaaaatacccaaattcaataatcggttaggtatatttacgtagtttcttaattttcaccttgagcctacaaatttcctggttgtgtaatcagagcttacttggcagtttatcgttagttaagcctgaattttgtttcccccaatgtagtaatttctaaaaaaaaaaaaatgcatttgagtttgattttttaaaattaggaatccaaagattagagccacctcagtctatttgccgccacatggggctgattttccctggcatttttcacataggtcccaagcaggttctcaagtcaaccccccacaccccatttctccagcttaactctggcttgcagtaaaatactgaattttcagttccttctgaaaatctcaaatgccaacttcttttccctaatttacattattatttgtcctttagtgtacatttttcatactgtattttaattaatcattttttgacaaagcattagatggcatatttaaaaagatatgttttctgtttgtaaatatttcccatgagaagaaagcaaggaatatcccgatagtgaattgtaaaaaatctctgtgcctctttttcttttgtcttccctaggcataaagatcttatgagaatgttttagtgtcaagatgtttttattttgcaaacgttatggggtgatttgtgcttagcaaccctgtcgtttattcttggtcctggctttcagtactgtctctgaataaaccaagataaccgctatggcgatgtctgctagagtatctagtgaatatcagctcctaaagtcattttctttcgtaggacaacctgagatatggagtgtagcctctcaagtggataccctggggaaaagatgaatctcttttaacttttatttttggttcaggggtacacatgcaggtttgttatacagctaaaattgtgtcatgggggtttggtgtgcagattattttgtcactgaggtactaagcatagcaccaaacaggtactttttctgatcctctttgtcctcccattctccaacctcaactaggcctcactgtctgttgttccctctttgtgtttacgtgttcttattattcagctcttacttaaatatttttttttttttgagatggagtttcgctcttgttgcccaggctggagtgcaatggcgcgatctcggctcacggcaacctccgcctcccaggttctagtgattctcctgcctcaccctcccaagtagctgggattacaggcatgcgccaccacttccagctaattttgtatttttagtagagatggggtttctccatgttggtcaggctggtcttgaactcccaacctcaggtgatctgcccgcctcggcccaaagtgttgggattacaggcatgagccaccgcgcccagcctcagctattacttagaaacaacatgcatttggttttctgctgctacgttagttttctaagaatagtggtctccagcttcatctatgttgctctatgttgcttcaaaggacatgatcttctgtgtgtgtgtgtgtgtgtgtgtgtgtgtgtttgtgtgtgtgcgtgtgtgtatgtgtgttttaacggccacacagtattccgtgatatttatctaccatattttatttatttatttttattttattattttttttttgagatggagttttgctcctattgcccaggctggagggcaatggcacgatcttggctcactgcaacctctgcctcccggttcaagcaattctcctgcctcagcctcccaagtagctgggattacaggcatgcgccaccacgcccagctaatttttgtatttttagtagagacggggtttcaccatgttggccaggctggtcttgaactcctgacctcaagtgatctgcctgcctcggcctcccaaagtgctgggattacaggtgtgagccaccacaccctgaccccatgttttatttttagtaaacctttttttttttttttttgagacggagtctagctctgttgcccaggctgaagtgaagtggtgcagtttgactcactgcaatctctgcctcctgggttcaagcaattttcttgcctcagcctcccaagtagctgggattacaggctcttgccaccacgcccgggtaattttttgtgtttttatttatttatttttatttttttagtagagatggggtttcaccatgttggtcaggctggtctcgaattcctgaccttgtgatctgcctgtcttggtctcccaaagtgctgggattacaggcgtgagccattgcacccggcctaaaccttttattttattttattttatttttgaagacagggtctcactctgttgtccagactggagtgcagtggcatgatctcagcttactgcagccttaacctcccaggctcaagcaatcctcttctactttagccccccaagtagctgggactacaggcacacaccaccaggcctggctaatttttttggtattttttgtagagacagggtcttgacatgttgccctgggtggcctcaaacttttgagctcaggcaatttacctgcctcagcctcccaaaatgctgagattacaggtgtgagccaccatgcccagccataccatattttctttatccagtatacaattgataagcatttaggttgattccatgtctttgctttcatgaatgacagggactgcaatgaacatacgtatgtctttataatagaataatttatattttactggttatatgcccaattatgaggttgctgggtcaaaaggtaattctgtttttagttctgtgaggaatcgtcacactactttttatagtggttgaataatttacactcccatgggtagtgtataagcattcctgtttctctgtaaccttgccagcatctgttatgttttgactttctaatactagccattctcactggatgagatgatatttcattgtggtttttctttgaatttccctaatgattagtgatgagcattttttttatgctcgttaaccacatgtatgtcttcttcgaagaaaacacccttttcatgttttttgtctactttttaggtcttttttttcctgtaacttgtttaagtttcttataaattatgggtattggacctttgtcaaaagcatagtttgcaaatattttcttttattctgtgtgttttttgtttactgtattgatggtttcctttgctgtgaagaagctttttagcttaattagcttcaatttgtcaattactgcttttgttgcaattgcttttggtatctttattttaaaatttttgccggcttctatttctagaatggtaattcctaagttatctcatgcattttttaaaataatttgaaattttacatttaaatctgtaatttatcttgagttgatttttgtatgtggtgtaatgaaagggtccagtttcaatcttctacatagtcctagctagttattccagtaccatttattaaatagggatttctttccagattcctgttgttagctttgccaaagctaacaaccagatggttgtaggtgtgttgtattatgggctctctattctgttgtattggtctatgagtttgtttttgtaccagtaccatgttgctttgtttactgtagccctgtagtatagtttgaattcaggtaatgtaatgacttcagctttgttctttttgcttatgattgccttggctatttgggcccttttttggttccatataaatttaaaaatttttttgttttgttttttagctctgttaagaaatatttttggtagtttgataaaaatagcattaaatctgtaatttctttggcaggatgactattttaataatattgatctttttttgtttgtttgtttgtttgagatggagtcttgctctgtcgcccaagctggagtgcagtggtgcgatttcggctcactgcaacctctgcctcccgggttcaagcaattctctccctcagcctcccgagtagctgagattacagatgcctgccaccacgcctggctaatttttgtatttttagtagagatggggtttcaccgtgttggccaggctggtcttcaactcctgacctcgtgatccacctgcctcagcctcccaaagtgctgggactacaggcgtgagccactgcgcctggccaatattgatcttctttatccatgagcacaaaatggttttccatttgtttgtgtcatctctgacttcaagcagtgttttcacagtgttgtcataaagatctttcacctccctggttagctgtatttctagatattttattctctttgtagtgattgtgaaggggttctgtttttgatttggcttttggcatgcatgtttttgatttacagggatgctactaatttttgtacatttattttgtattctgaaattttactgaagttttttgtcagtttgaaaagctttcctaggcctggcgcggtggctcacacctgtaatcccagcactttgggaggccaaggcgggcagatcatctgaggtcggaagttcaagaccagcctgaccaacatggagaaaccccgtctctactaaaaaaacaaaattagccgggcgtggtggcgcatacctttaatcccagctactcaggaaggctgaggcaggagaattgcttgaacctgggaggcagaggttgcagtgagccaagatcgcgccaccgcaccccagcctgggcaataagagcgaaacttggtctcaaaaaaaaaaaaaaaagaaaagaaaagaaaagcttttctgtgatgattatagggtttttcagatacagcattatgtcatctgtaaaaagaaataagtttgacttcctttcttcctgtttgtatgcctttttttttttatcttgcctaattgctctagccaggacttccaattttatgttgaataggagtgttgagaggaggcatgcttgtcttgtgcctgttttcaaagaaaaatgattccaggttatgtatattcagtatgttggctgtgggtttgtgatagataactcattattttgaagtatgcaccttccatccctagtttgttgagactttttaacataaaaatgttaaattttattgaaagccttttctgcatctattgacatacttttgtgctttctgtcttcagttcttattatgtgatgaatcacatttattaattcatgtgtgatttttttttttctttgagatggagtctcactctcttgcctaggctggagtgcagtggcgcgatctcagctcactgcaacgtctgcctcccgggttcaagcaattctcctgccttagcctcccaagcagctgaattacaggtgcttgctaccacgctcggctaatttttgtatttttagtagagacagggtttcaccatgttggccaggctggtctcgaactcctgaccttgggtgatctgcctgctttggcttcccaaagtgctgggattacaggcgtgagccaccacgccccacctcatatatgttgaattagccttgcatccccaaaataaactctacttgattatagttggttaggtttttgatgtcctgctcaatttggtttgccaatattttgttgagaatttttgcatcaatgttcatcaagaatattggtctaaagttttcttcttttgttttatctctgtcaggttttggtatcagaatggtgctgtttttagttttttggaatagtttcagtagaagtggtaccagctgtcctttgtccatctactagaattcagctgtgaatctatctggtcctagcctattttggttggtaggctatttattactaattcagttttcaagcttgttatttatctattaagggctttgatttattttttgttcagtcttgagaggatatatttattcaagaatttttccatttcttctagattttcaagtttgtgtgcatagaggtgttcatagtagacttcaatatatttttgtggggtcagtggtaatgtctcttttgtcatatttaattgtgtttatttggatcttttcctttttcttcattaatcttaatggtggttggttttatttttatgtttttaaaaattttactcctgtacttgttgatcttttgtatagtttttcatgtcaaaatcttccattcagaaatgattttggttatttcttctgctagcttaggggttgatttgctcttgcttctctcagtgttttatttatgatgtcaggttgttaaactgaagtctttctaacttttcaatgtaagcatttaatgctataatttttttctcctaacactgccttagctgtgttgcaaaaattcaggtatgttgtatctttgttctcatttttttcagagaacttcttggttcctgccttaatttcattatttacccaaaagtaattcaagtgcaggttgtttaatttgcatgtacttgtatgattcaagtgattttctttgtattgaattacatttttatcaagctgtggcctctgtgtgtggttcatataattttggaatttttaaatttgctgaggattgttttgcttctgactgtgtggtcaattttagagtatgtgccacgtgatgatgagaagactgtatactatgttgtttttagatggagagttctgtagaaatctattaggactgtttagtcaagtgttgagtttaggtcttaatatctttgttaattttctgcctcaataatgtgactattagtgcccacgggtgttgtagtctcccactattattgtgtcagtatctcattctcttcataggtctctaacaacttgatttatttatgtgcccccatcaatttatttacttatttattttttattttttgagacggagtcttgctctgttgcccaggctggagtgcagtggggcgatctcggctcactgcaagctccgcctcccgggttcacgccattctcctgcctcagcctcccgagtagctaggactacaggcgcctgccaccatgcccggctaattttttgtgtttttagtacagacggggtttcaccatgttagccaggatggtctcgatctcctgacctcgtcatccgcccgcctcagcctgccaaagtgctaggattacaggcgtgagccagcgcgcccggccacgcccccatcagtttattataacatctttctctcttctgcttttttaccataaacattctttcacattcacaatccagatgtcccagagttcaagaacgtgtccagtgacctggttgttttaggagaaaatgtaaattaaaaataagaggctttatttacatacgtgaaaataagggaggatattttgttcatctctgttttattaaagcatttagattatatgtaggtatttttctctgcttttttgaaatatacataaattatattaacagctaaataaaccttttgtctttttttttttttttttttttttgagatggagtctcgcactgttgcccaggctggagtgcaatggcatgatcttggctcactgcaagctctgcctcccgggttcacgccattctgctgcctcagcctcctgcgtagctgggactataggcacccaccaccacgcccggctaattttttatacttttagtagagacggggtttcaccatgttagccaggatggtctccatctcctgacctcgtgatccacctgccttggcctcctaaagtgctgggagtacaggcgtaagcgaccgcgcacggccttgtcattctttttgactcaggattgtctttatttgtaacctgagattcattgctttgtgtttgctttggcagaggtttatttttttaattttcagtcattaaaagtacacacagatttattcagagtaaagctcattttaagagcacttgaaagttggacacaaaggtagaattaaatttagcaatacagaatgataaagactaaaagatacagagttaagttcctttgacagaaacttgattatccaaggtacttatttgcaggctgaagtacttacaatgcaaaagcaaggtctggccgtggtggctcactcctgtaatcccagtgctttgggaggccgaggcgggctgatcatttgaggtcaggagtttgagaccagcctgaccaacatagtgaaatctgtctctactaaaaatacaacaacaacaacaaaattagccaggcatggtggcgcatgcctgtagttccagctacttgggaggctgaggcaggagaatcgcttgaacctgggaggcagaggttgcagtaagcgcacatcttgtcactgcactccagcctgggcaacagagtgagactctatcctcaaaaaaataaaaataaaaaaaataaataagtgcagactcagtcggatattgctgctttctgttttctctgtaaactttaaaaagccaacaaagattatgatactttaagatggagattagttgtcttcaatttgttccagaagtaattgtgttgtgacaagagtgccaagtataagggactctgtgctgtgcctgctttctctaactaatgctaataatgagcctagggggagcatcatcagcattgacaggggacttatttaaaacacccattcatggacctttccatacctgcagaatcacattacatagattgagaccaacattaccaagtgatttataagctcaataaaacttgagaggcaatgcttagttcagtggttgtaagcccaggctgctaattacaatcacatggccagtttgcagaactccctttactggtgcccttcccacaggttctgtttaatgttctgggtggaagcattcatgttattttaattaactgcctcatgtgactctaagttgtggccagaatcaagtatagggggttcaagatacatttatgagagttaagtttcacctgtgcactaaagggtagtcctagagcctcttttctttgggtttcatagggacagggcagtgtggctcatacttttgttactgtagcagaaattgctggcaggggagggcacctgaagacaggaaaggagaaacttgtatttttatatctgtagagcagctcattgttgctgaatctcttctgttataaagtacagaaatgggtggagttttttctgttttgggtcttctgcctgtgggtgtggtggtagcaggtaaacatgtggtgctgacacttttcaaggcatagtctcaagatgcggtgtaatttgtccagagaatcttatctgagaaggaatcctagaaaagaaggagaaagagaaaaaatggcattcttaatgatgaaatattgaatacttattttatttttattttactttaagttccaggatacatgtgcagaatgtgcaggtttattacataggtatatgtgtgccacagtggtttgctgcacgtattgacccatcttctaggtgccctccccttgccccccactccacaacaggccctggtgtgtgttattcccctccctgtgtccttgtgttctcattgttcaactaccacttatgagtgagaacatgcggtttttggttttctatccctgtgttagtttgctgaggatgatgacttccagcttaatccatgttcctacaaaggacatgatctcatttctttgtatggctgcatagtattccatggtgtgtatgtaccacattttatctatccattctgtcattgatgggcatttgggttgtttccatgtctttgctgttgtaaatagtgctgcagtaaacatacgtgtgcatgtgtctttataatagaatgatttgtattcctttgagtatataaccagtaatgggattgctgggtcaaatggtatttctggttctagatccttgaggaatcaccacactgtcttcgacgatggttgaactaatacacattctcaccaacagtgtaaaagcattcctatttcttcacagcctcaccagcatctattgtttctgactttttaataatcaccattctgactggtgtgagatggtatctcattgtggttttgatttgtatttctctaatgatcagtgatgttgagcttcttttcatgtgtgttggctgcataaatgccttctgagaagtgtttgttcatcttttgcccactttttttttttgagatggagtcttgctctgtctcccaggctggagtacagtggcacgatctctgctcactgaagcctacacctcctgggttcaagtgattctcctgccccagcctcccgagaacctgggactacagatacccaccaccacgcccagctaatttttgtatttttagtagagatggggtttcaccatattggccaggctggtctcgaactccatacctcaaacgatccacccaccttggcctcccaaagtgctgggagtacaggcatgagccactacacccagcctttgctcactttttgatggaattgttttttttcttgtaaatttttaaaagtttcttgtaaattctgaatattagatctttgtcagatgggtagattgtaaaatttttctcctattctgtaggttgcctgttcactctgctgatagtttccttttctgtgcagaagctctttagtttaattagctcttatttgtcaattttgggtttagttgcagttacttttggcatttttgtcatgaagtctttgccgatgcctatgtcctgaatggtattgcctagattttcttctagggtttttatggttttgagttttacatttaagtctttaatccatcttgagtaaatttttgtataaggtgtaaggaagaggtccagtttcagttttctgcatatggctagccagttttctcaggaccatttattgaatagaaaatcctttccccattgcttgtttttgtcaggtttgttgaatatcagatggttgtagacgtgtggtgttatttctgaggtttcttttctgttccattggtctatatgtctgtttttggaccagtaccatgttgttttgcttactgtagtcttgtagtatagcttgaagtcaggtagtgtgatgcctctatctttgttctttttgcttaggattgtcttggctatatgggctcttttttggttccatatgaaatttaaagtctttttttctaattctgtgaagaatgtgaatggtagtttgatgggaataacattgagcccataaattactttgggcagtatggccattttcatgatgttgattccttctatccataaggatgggatgtttttccatttgattgtgtgctctcttacctccttgaggagtggtttgtagttctccttgaagaggtccttcacattccttgttagctgtatttttagatattttattctttttgtagcagttgtgaagtttatttatgatttggctctctgattgtctgttgttggcttataggaatgcctgtgatttttgcacattcattttgtatcctgagactttgctgaagttacttatcagcttaaggagtttttgggctgagatgatggaattttctaaatatagaataacgtcatgtgaaaacagagagaatttgacttcctcttactctatttgaatactctttatttctttctctttcctgattgccctggccataacttctaatactatattcaataggaatggtgagaaaggacatccttgtcttgtactggttttcaaagagaatgcttccagctttttcccattcaatatgatattggctgtgggtttgtcataaacagctcctattattttgagatatgttccattaacacctaatttattgagagttcttaacatgaaagaaagttgaattttatcaaaggccatttctgcatctattgagataatcatgtgatttttgtctttagttctgtttatgtcatgaattatgtttattgatttgcatatgttgaaccagccctgaatcccagggatgaagccgacttgatcatggtgaataagtttttgtttttgtttttgcttttttgagaccgagtttctctcttgttgcccagtgcaatggtgtaatctcggctcaccgcaacctccgcctcctgggttcaagtgattctcctgcctcagcctcttgagtagctgagattacaggtatgcaccaccacgcccggctaattttttgtacttttagtagagacgaagtttctccatgttggtcaggctgggctcaaactcctgacctcaggtgatctgcctgcctcggcctcccaaagtggtgggatttcgggtgtgagccactgcgcccggcctggtggatgttttttgatgtgctgctggattcagtttgccagtttttttttgtttgtttgtttgttgttgttttttttttttttaggcagagtttcattcttgttgcccaggctggagtgtaattgtgcagtcctggctcactgcaacctccgcctcctgggttcaagtgattgtcctgccccagcatcccaagtagcctggattacaggtgcccgccactacacccagttaatttttttttttaatttttattagagatggggtttcaccatgttggccaggctggtctcgaactcctaacctcaggtgatcccccccaatctcggcctcccaaagtgctgggattacaggggtgagccaccacgcctggccctattttgttaattttttcaaaaaacagctcctggattcattgatttttttttgagggtttttcatgtctatctccttcagttctgctctcatcttagctatttcttgtcctctgctagcttttggaattggatttgtttgctcttgctttctagctcttttagttttttttttttttttttttgagatggagactcactctgtcacccaagctggagtccagtggcgtgatcttggcttactgcaacctccgcctcctgggttcaagcaattctctctgcctcaacctcctgagtagctgggattataggtgcccaccaccacacctggctaattttgctattttttagtagagatggggttttgacatattggccagaggctggtcttgctctcctgatttcaggtgatttgcctgcctcggcctcccaaaatgctgggattacaggcgtgagtcaccgttccccgacttagctcttttaattgtgatgttagggtgtcgatttgagatttttctagctttcttatgtgggcatttggtgctataaattccccttttaactctgtcccagagattctagtatgttgtgattttgttctcactggtttcaaagaacttttgatttctgccttattatttacccaggagtcattcaggagcagattgttcattttttatgtaaatgtgtgcttttgagtaagtttcctaatcccgagttctaatttgactgtgttgtggtctgagagactgtttgttaccatttcagtcctgttgcattggctgaggagagttttacttccaattatgtggttgattttagaaaagtgccatgtggcactgagaagaatgtatattctgttgatttggggtggtgagttctgtagatgcctattaggtccacttgatccagagctgagttcaagtcctgaatatcctagttaattttttgtcttgttgatccgtctaatattgacagtgaggtgttaaagtctcccactgattgtgtgggcgtctaagtctctttgtaggtctctaagaacttgcttcatgagtctgagttctcctgcattgggtgcttatgtatttaggagagttagctcttcttgttgaattgactcctttaccattaaataatgcccttctttgtcttttttaaatctttgttggtttaaagtctgttttgtcagagactaggattccatcccctgcttatttctgctttccatttgcttggtaaattttgcttcatccctatgtgtgtctttacacatgagatgggtctcctgaatacagcacactgatgggtcttgactctttatccaatttgccagtctgtgtcttttaatttgggcatttagcccatttacatttaaggttagtattgttctgtgtgaagttgatcctgtcatcatgatggcatctggttattttgcacactagttgatgctgtttcttcatagtgtcattggtcttcatggtgtgtttttgcagtggctggtaccagtttttcttttccatatttagtgctttcttcaggagctcttgcaagccaggcctggtggagacaaaatccctcagcatttgcttgtctggaaaggattttatttctttttctactcatgcagcttagtttggctcgatataaaattctgggttcaaaattcttttctttaagaatgttgaatattggcctccattgtcatctggtttgtaggatttctgctgagaggtccactgttagtctgatggacttattttgtaggtgacctggcctttctgtctgactacccttaacatttttttgtcatttcaaccttggagaatctgatgattatgtttcttggggttgatcttcttgtggaatatcttagtggtgttcttggtatttcctgaatttgaatgttagcttgtcttgctaaactggggaagttctcctggatgatatcctgaagtgtgttttccagcttgtttccattctccccctttccttcaggtattccagtcaattgtaggtttggcctttttatgtagtcccatatttctcggaggctttgttcattcttgttcattcttgttcagtctttttttctctaatcttgtctgcatgccttatttcagcaaggtggtctgcaaactctgatattttttcttctactttgtcaatttggctgttgatacttgtgtatgcttcatgaagttctcatgctgtgtttcttagctccgtcaggtcatttatgttcctctctaaactggttattctagttagtggctcctctcgctaactttttatcaaggttcttaggttttttgcatttggttagaacatgctcctttagctcagtggagtttgttattgcccatcttctgaagcctacatctgtcaatttgtctatctcattctccatccagttctgcacccttgctggagaggcattgcaatcatttggagaagaagaggcacccttgccttttgggttctcagtgtttttgtcattgattctcatcttcatgagtttgtctagtttcgatctttgatggggttcttgtggggacttttttgttgctgttgttcatttctgtttgtttttctttcaatggtcagatccctcttctgtatggttgctgtggtttgctgggggttcacttcaggccctatttatctggttcacttctgaacctggagatattaaggagattggagaacagcaaagatgggtgcctgctccttcctctgggatctctgaccttaaggaacaccaatctgatgccagtaggaacacagctgtatagggtgtctgacaaccccagttggagtatctcacccagttgggtggcatgaggaacagaacccatttaatgaagcacttttattgtcccttggtggagggggtatgcttcactggggttaaactcactcctctgggctgcttggattcctcagaactggcggggggaaaagctaagtccactggtccacagaaactgcagtcacctctccccctagggactcaggcccagggagatcagagttctgtccctgagcccctggctggagttgttggagttcctgcagagtggccccacacagtgaggagggatgtgtcagggtcaggcctgaagaggagctgtagctgcagtctggcacagccagtgtgttaggctgtgggggacacctcttgggaccaagccgtccagcatccctggctccagcaggggaaaagcatggccaggagctatagagatgactgccgcccttcccctgcccagggagcctagtgtgttaggcagctgtcagtcccagtgctggttgctgcccctcccccagggagctcaaatggcttaaacagcaggcagccatagctgtagtgctggtcacccctcccctgggaactcagcaggcttaagcagattttagctgagaggctgttgagaatctgcacagctctggggttgggatcctaggccccagtggcatgggttcacgagtgaaatctttcagtctatgggttgcacaattccatggaaaaggcatggttttgtcggctaagtagcacattcattcaccgcctcccttggctggggggtgggggctcccctgccccgtgtggctctcaggtgggttgctgcaccacactgctctttcttcctctctgtgggtcatgccagctgcctagtcagttctgatgagagaacctggatacctcaggtgccagtgcaggattcacaggccattatggttcttttcggtgggagtctctgatcaccgctgcttctagttggccatctttgccctgcccctaaaaaatggcttttttttctttttaagctaaacatgtctcagatgaagaactgtgtccactctgcctcctggaatgccatgtgttcagtacttgcaaagctttacttttctacttgtgctttttcttcctaatgagtttaactactttttagttcttataatagtcaaaggtctctgaaaaatatttctttcctacataccagagtcttctctacattctcaacatcatggcttcttacatgtcatcaagaattctcaccatgaatttatgaactgcaatattaagaatgtttccttcgtggctatggaacatgggaaggtgtagatactcaagattcctattggggaaaagctggggtccttaataaagatggagagcatgtaattttgaggttccatctctgttctccattagctgtaaacaaataagattaagaaaatgcttatttaaatgggatggcatttattacgcagaaagtttaaaaataataataattaggagatacttgctctttagggtgtgaaagaaagactacttaaaatcactattaaaatttacagaacatggcagatattggtatctggaactttacataaaaccagtgtttctttatgattaaattcagactataatttacttttggctgggcaatatcatagcagtgatgccgtgtccttctgtgtgcatcagcacatttgtcttcatgcacttgatgttaataactcacttgattaatgaactctgtgacagatttttttctatagagttaattatttttctcttcattactgagtatctttattcagcagatgtgcataaacaatcacatttaatctggcagctgacctttcttaggctttttttttttttttttgagacggagtctcgctctgtcgcccaggccggactgcggactgcagtggcgcaatctcggctcactgcaagctccgcttcccgggttcacgccattctcctgcctcagactcccgagtagctgggactacaggcgcccgccaccttaggttttctttgcatttatctgtctttggaaaatgaaagctctcatctttgtttacaggccagaaaaactgaaaaacacacaggcttttccacttactggatgtttgacaaaatagttttcttggaccaaaaacatgggcattactggtgagcttgttagagattcagaaactcagattttattccaaattttcttttcttttttttttttttgagacggagtctcgctctgtcacccaggctggagtgcagtggcgcgatttcagctcactgcaagctccgcctctggggttcatgccattctcctgcctcagcctcccgagtagctgggactacgggctctcgcctccacgcccggctaattttttgtatttttagtagagacagggtttcaccgtgttagccaggatagtctcggtctcctgacctcgtgatccacccgccttagcctcccaaagtgctgggattacaggcgtgagccatcgctcccagcccagattttctgaaaaaataatctgcattaacaagatctccagtttattgtacacattaacatgtgagcagtattttctaactgaatatgtcttttccatctgaaaaatttacacaacttattctgtatgatgtaaatgtagcactcaaaaatgtacatgttagtgttaatgccctcaattttatacttcatcatccgaagaagtatcatacttacctcgatgttgtggatcttatgccactctcttttctcagagttagagaatgcattagagaatatacttctgtgctgaaagttatttattaaatatatcagtcactcctataagtaagaaccagttctctttactcttgttttaccttgagtcaaattaaaaattctgttcatggccacttggtaaatatgtatgtgtgtttgtatgtttttcagggagtgttgacatttagggatgtggccatagaattctctctggaggagtggcaatgcctggacaccgcacagcagaatttatataggaatgtgatgttagagaactacagaaacctggtcttcgtgggtgaggataacttcaatatacaattccctaatataccctataaattttatttctcttttttgtagaatggtttttggtaatttatgctttcagatctctgttttttgtttttaacttcaagatttgtctatgtagaaaagaatttcaagatgtttcattttgacctgaactttccacactcctgagctgatctgtgttcttcactctagattagtgttaattttagaaatttagtggcataacgtactgttgcccacatcttaaaatctaattgccactaccagtttttgatttagtagtatcaggtagtgaaattaagaacttacaaaattaaaatatttcctaaatatttaaaattttttgttgtgtattagtattttggaatcaatttactagaatattctattacatccttttttctgaacacactactaaattggtaattggagaatatgagcaagattcatgttatttgtaataaaacaggtattgctgcctctaagccagacctgatcacctgtctggagcaaggaaaagaaccttggaatgtgaagagacatgagatggtagctgaacccccaggtaggtgagagtgaaagtgaatacaacagatgacacagatgagagctccaaagtagaaaaaaaaaaaagccagtccttaaaatgatttgaaatctgtgttccaaaggaaatagtttctgggaagcctgaattttttaaattttgctttcacatagaagcatcttctgtcttatatttttaaaatctctgaagattttactttccctttggtgatcttcttcaagtttacagtgacagccaagacagccctcttcatggcacataagagactgtgaaatctgactttttcactgtttttgaaaacacgtagataatctgcataattttgagaaactctatgttaaactgtttttcaagttctgtttttacattatgtcctaaatgtgtgagagcagtggtttctgttccattggtttctttattgctaatttttctgcacattgcattctgtcttattatagtcttgaagtatagtttgaaattataaagtatgatgttcttctgctttgtcctttttttttcaagattgctttggctattcaaagtttattgtaagtctatgtgagaattgtattttctttttctctttcttttttttttttttgagatagagtctcgctctgtcacccaggctggagtgcagtgtcatcatctcggctaactgcaacctctgcctcctgggttcaagcgattcttctgcctcagcctcctgagtagctgggaatacaggcgcgagccaccatgcctgactaatttttgtatttttagtagagatggggtgtcaccatattggccaggctggtctcgaactcctagacctcgtgatccgcccacctcggcctcccagagtgctagaattacaggcgtgacccaccgtgcctgactgagaattgtattttctattgctgtaaaaaaaaaatactggaattttgatagagaatttattgaatctagagagcactgtagataacacggcactttaataatattctttcagccgggcatggtggctcacgcctgtaatccctgcactttgggaggccgaggcaggcggatcacctgaggtcaggagtttgagaccagcctggccaacatgatgaaaccctgtctctactaaaaatacaaaaaattagtcaggcgtggtgacaggcgcctgtaattccagctacttgggaggctgaggcggaagaatcgcttgaacctggtaggcagaggttgcagtgagctgagattgcaccactacactccaatgtgggcaacaagagtgaaactccatctcaaaaaaaaaaaaattctttcaatcaatagacatgaaatgtttttaaatttatttttgtcttctccaatttttttttattgatgtatcttttatttgaaagatatttaagctccttggttaaatttgttctcagaaatttattattttagtgctattgtaaataagattgctttctgtctcttttttgtcagatagtttgtttaaagtgtatggaaccataacttacacttgtatgttaattttctattttgctaaattattgagtgtaattattactttaattaggttttaaatgtactgtttatggttttctatatacaagatcaaatgatctacaaaaagcaactttttacttatttgtcttcaatttcagtgacttaatttttttttttttttttttacttattccacatacttccagtgctgtgttaaaatagaagcgttgagaatgggcataataaacttttgcattggtgtctgtgagtttgaaggagcaaacacctcttcaagtttttcttgttgttttttttttttttttttttttttttgagacagcgtctcactctgtcgctgagactggagtgcagtggcgcggcctcggctcactgcaacctccacctcccaggttcaagtgattctcctgcctctgcctcccgagtagctgggactacaggtgcgtgccaccatgcctggctaatttttatatttttagtagagatggggtttcaccatgttggccaggctggtcttgaactcctgacctggtgatccacccgccttggcctcccaaagttctgggattacaggcatgagccaccgcgcctggccctcttcaagtttttataaattggtttcagaaagtgaagatcttttgttgagcccccagggtgatgggatgtcctatgggtttgtagtggagaggggtaggtagcttgtttacaaaggctgctgggtctgcattagggtccacctttagttggcttgttacaaggggcttaggtagttgtaattcccattttatttttggacagagtgagtatccttcaggactttgctctgtagggcagacgctagggcagatttctgcacttgggtctgcatatggtaggctttatattaggatgtagatgagtttggctttcactgaaaaccagagaggatttcccatggtcactgtgtgggtttctacataggcagaacttgccatgaactgtggctcagggtgataaaactgagtcatggaactgcttcagggaccacagtaagggccaaggtctgcaggcctgctgcatggctataaaggggtgtctgtctctaggcttctgaaagggcaagacctctcccagactgtggctgggaggagtttgggatgattgcagtgtaagttcagaattctcagtgggaccaagtttggtgggccattttctggtctgtagccaagaacaggggtcctatagtttgccacctgaatgaaagcctgccttctgaagagaatattcctcaatcttgggcattagcagagtttcacagctccctccgtagatctcaaagctctttaagggcacttattttggagatgggttcttgctacataacccaggttgatcttgaagttctgtcctaaagcatttctcattacaggtttgagtcatgattcctgtttctctcataaaggcatttttgtcaggctgatgaattttcttgctgtcagaaaataagcaaataaggcaccatttatttttccatcttagtgatgtcactcttcctgtccatttttactttctactttctatttcaattttgtcagtagttttagatttagacatttaggacaatatactaaaatttacatgttatgtctgaagtgaattaggtaattagtagacagacaaaaaggaaatatagacaggcaaaaaaagattacaggattttcactcacttttgtcagctagtacctaaaatatgacatgatttgttcccaaatatttgtttcatatatcagaggccctgaccatattctgcaaaatagatatattttttctttatttagcaatgtaaggctattttttgcttctaaatttggattacagcagttttattttgtgtaagaatagcatatatttaaaacttagaaatgatcttaaaatgcttatttatcagtttgtcattagagtcttctgtttatgattatactgcattttatctgaaacttttactgcattacagtgcatgccaatgattcaaaatagccaccttcaatgagtacacagttacagtaaaatattacagttatctacacaaattctttgttaatgctacatcaagttacataccagattttatgagtaaacatttattattattttttagtttcatattaacgcattttttcagtgtaggtttcttaacataagtttattgtgttttttggttttacaattttagacaatttgcaattctgtttttacatgtaagtcggtgtgtggtttaagagatagatcagccttatctctattacaatctgattatatgtgtgtgtgtttttatctataaatatgaccccaattttggttatggctaatcttgtatatattttttcttggctgatttttaatggtggctttatcttgtctaaatgagtagtcatggaaatagtcttattttcaccttgtgtttaataataaacatatttcctatgtgtgagggaaacacttttgtgacttgacggtaatttttggaaagatttataattctggatcttcttcagttattcttctaaaaaacaattgtataaacatataacctaaaatttaccaccttaaatctatttaaatgtacatttcatggccagtcatggtggtggttcacgtctgtaatccccggattttgggaggccaaggcaggaagactgagcccaaaagcttgagaacatcctggaagacatatggaaacctcatctctgtaaagcattttaaaacttagccagacatggtgaagtggtcctgtctccttgggagattgaggagggaggattacttgaacctggaagtttgaggctgcagtgagctgtaattgtgccatgcaccccagcttgggtgacagagtgagaccctgactcaaaaacactgtacatttcaggcatgttaagtatatttacattattttataaaagatttctagaaattttacaatacacattaaacaactaccaatttttcccatttcctggcacttttcaaataccgttctgttttctgtttctaagagtataactgctttatatatctcataaaatctgtttgtggctggctcattttattttgcataaagtcatcaagatttacctttatagttgttagaatatttcctgctttttttcaaactgagtaatatattggcatttttgtatttcaaattatatctgctgaacgatttggtgaccgaaatttgccttgcttttacctactggcttttagtaacaatgctaaaataaatgtgggtatgcaaatgactcttcatgtgaccatatatgtgagagtttatatatgtgctgcattctattttattagtctactttttcacctttatagtcataccaaattgttttaattctgtagctttgtgttttgaaatcaggaactgtaatgcctccaacattgttttgttttgtttttaatatttttgggtactttattgtatgtagagattctgtatactcgagggattgctgtttctgtttcttcaaaaatgcagtgagaaatttgaaaaacattgcattaaatctgtagattgcattgagcaggatggacatctttacagtattacctttttcagcctttcacaagagcatgctcaagagtgtgttgtttaatttctatatatttgttaatttttcagattttttttctcgttgtatactcatttcattttggtgatagaaagtaatttataaaatttcagttttaaaaaaactggtaagacttaattttcttctttttgtaataagaggaggtctatcaaggaaaatgttgtattagctattgagaaccatgtgtgtcctggtgttgaggggtgttttctatacctctgttagaaataattgtcttacactgcctggaagtcctctattcccttactaatattctcatttaatttttattacggaaaatgcagtgtcaaaatatcctactataattatgttgctctctatgtgtctctgttattctgtcaatgtttgctttatatgtttggagccctaatgtgagatacacacacacacacacacacacacacacacagagagagagagagacgtgtatacagatttgtcataggttcccagtgagtaaatctgaagtggtttttttttgttgttttttttttttttttgagacagagtctcactctgtgtcccaggctggagtgcagtggtgtgatctcggctcactgcaacctctgcctcctaggttcaagcgattctcctgcctcagcctcccgagtagctaggattacaggtgcccaccaccatgcccggctaatttttgtatttttagtagagtcagggtttcaccatgttggccaggccagtctcgaactcttgacctcaagtgatccacctgcctcaacctcccaaagtgctgggattacaggcgtgagccaccatgcccagcctaaatctgtaagttttaatgtccttttttgtctccttggagttttaacttcaagtacattttgtaaaatatgatagtttttgacttaagatgtagcttgcataatactatcttgatttcttctgctctcatttgattaatatttgcatgaaatgtattcttccatcttgccccttttagtgttttttatcattagatctctactgactcttgtagaaaaaaaagttggatcttggtttttaaaatttttaatctgttgaaagtatgtctcgatttgaaagttaattttatatatacatttaaataattgataaagacggactgttacatttttaattattttatttgattcttgcatctttgtttctcattttctctctttgtgtctttttgatttttgtattgatatgcttttacttatttctaattcacttttgtatatttgtacagatttttttttttggtggcaccttgggggttgcataaaacttctataagaaacaacagtatagttttaatttggtataaaataaatctcagttgaataaaaaaatcttcctcattacatctgccctgaaatttgtctttgatgttgctaattatgtttttacattgtatattcattaacagttgtttataatttctgtgcttttatttttcaaaatttagagatcatttaaaatgttttctgcaccattatgataatgccacaagattctgtttttatgtatgtgcatatctttcctggaaaataatgtatttttatatgattatgtgtttttttttttaatacttttactttcagtttaaggaactgctttcatcatcttttatatgtagggcatatgcagtgctaatatactttttcagaatttggttgttttggaaggttttttctttttatgtggcaggacagatttgttgatggtattatcctcaacttgatagctttttttttttttttcccctcaggactttgtgtcacacggtatctttctgatctgcagaatttttgttgataattcactggtaatatcataagactatgtttgtaaatgacacattacttttaccttgtagctcctaagactttcttcttgtctttgatttttgaaaatgtgcttaatatgtatctgtttaaatatctgtgtgtgtatcctaatttgtttgttgaacttcatttttacatcatttttcttttaggattttccagttgtttatttttctactttttaccaccaaattgttttttttaatattttgatattcttgtatttattctcatttttgtgactttctacagtggactgtgttcctgtttcactcattggatattattcaacttatgagtgtttaaaatgtgtacatcttttttatggtttctttctgaagtttatacggtatttttgatgaaattatattgccctgttttgtatacattgtaatcttggaatgagatttggacatcaaaaaaagctacctgtcacagtctttaaaatgtgtttttttctgacatagtctgaaaacaattatcttggctagagattctgggagtctctcaaacatgttcttaggatctgccttgtctaaaattttgtgtttagtttttagtcagaggagtttatttgtgtttctcttcttttttttttgaaacagagttttgctcctgtcacccaggctgcagtgcaatggcatggtctcagcccactgcagcctccacttctctggttcaagtgattatctggtctcagcttcccacttagctgggattacaggcatgtgaccccatgctcagctacttttgtatttttagtagagacagggtttcactatgttgcccaggcttggtctcaaactcctgacctcagctgatcctcccaccttggccgccaaagtgctaggattacaggtttgaaccaccaaactccttcttaataaccaataatcacttgctataattgtttcctgtctgtagtaccacagtctttctgctgctgtaaaacttacctttcttatttatttatttcattatactttaagtcctagggtacatgtgcccagcgtgcagttatattacataggtatacatgtgccatgggttaatgctatccttcccccagcccctcataccccgacaggccctgttgtgtgatgttccccgccctgtgtccaggtattctcattgctcaattcccacctatgagtgagaacatgtggtgtttggttttctgtccttgtgatagtgtgctcagaatgatggtttccagcttcatccatgtccctgcaaaggacatgaactcatcctttttcatgaatgcatagtattctgtagtgtatacatgccacattttcttaatccattctatcattgatggacatttgggttggttccaagtctttgctattgtgaatagtgccgcaataaatatacgtgtgcatgtgtccttatagtagcatgatttataatcctttgggtatatacccagtaatgggatggctggctcaaatggtatttctagttctagatccttgaggaatcataacactgtcttccacaatggttgaactagtttacagtcccaccaacagtgtaaaagcgtttctatttctccacatcctctccagcacctgttgtctcctgactttttaatgatcaccattctaactggcatgagatggtatctcattgtggttttgatttgcatttctcggatggccagtgatgatgagcatttttccatgtgtctgttggctgcataaatgtcttcttttgagaagtgtctgttcacatcctttgctcactttttgatggggttgttagtttttttcttgtaaatttgtttaagttctttgtagattctggatgtttgccctttgtcagatgggtagattgcatagattttctcccattctgtaggttgcctgttcattctggtggtagtttcttttgccgtgcagaagctctttagtttaattagatcccatttgtcaattttggcttttgttgccattgcttttggtgttttagtcatgaagtccttgcccatacctatgtcctgaatggtattgcctaggttttcctctagggtttttatggttttaggtctaatatttaagtctttaatccatcttgaattaatttttgtataaggtgtaaggaagggatccagtttcagctttctacatatggctagccagttttcccagtaccatttattaaatagggaatcctttccccatttcttgtgttttgtcaggtttgtcaaagatcagatagttgtagatgtgtggtgttatttctgaggtctctattctgttccattggtctatatatctgttttggtaccttacctttcatctcagcagcctcaaactgtcatttgaaagaataccactatttctttcagaacttttatgcaatgagacacaggaaccagtgtaaaagcccctgccattgagaaataaagatgtataagccattattttacttgtcttttaaaaatgaaaccaggagttggcaatttatttctaaagtcactatgttatatagggaagcaggaagatctgcactgggtaaatgtaacagacttttctttcttctatgtgactctttgcattgggctcacctggggcactgcacacacttaacttactttaatttttcagaaatgtaatttgttctgtatgcttttatatgtctgtgaaaatgttagagcgtgtaatattttgctgtaacatcttgtgatgtagtttgtataattttataggttagatttgtaaagtacattcgtctgagtcagtaagtgaagtaatttattatttttatttctttcagttgtatgttcttattttgcccgagacctttggccaaagcagggcaaaaaaaattatttccaaaaagtgatactgagaagatataaaaaatgtggatgtgaaaatttacagttaagaaaatactgtaaaagcatggatgagtgtaaggtgcacaaagaatgttacaatggacttaaccagtgtttgacgactacccagaacaaaatatttcaatgtgacaaatatgtgaaagtctttcataaattttcaaattcaaacagacatacgataagacatactggaaagaaatctttcaaatgtaaagaatgtgaaaagtcattttgcatgctttcacacttagctcaacataaaagaattcatagtggagagaaaccctacaaatgtaaagaatgtgggaaagcctataatgagacctcaaacctttctacacataaaagaattcatactggaaagaaaccctacaaatgcgaagagtgtggaaaagcctttaaccggctctcacaccttactacacataagataattcatactggaaagaaaccctacaaatgtgaggagtgtggcaaagcttttaaccaatctgcaaaccttactacacataagagaattcatactggagagaaaccctacaaatgtgaagaatgtggcagagcttttagccagtcctcaacccttactgcacataagataattcatgctggagagaaaccttacaaatgtgaagaatgtggcaaagcttttagccagtcctcaacccttactacacataagataattcatactggagagaaattctacaaatgtgaagaatgtggtaaggcctttagccagttatcccaccttactacacataagagaattcattctggagagaaaccctacaagtgtgaagaatgtggcaaagcttttaaacaatcctcaacccttactacacataagagaattcatgctggagagaaattctacaaatgtgaagtatgtagcaaagcctttagccggttctcacaccttactacacataagagaattcatactggagagaagccctacaaatgtgaagaatgtggcaaagcttttaacctatcgtcacaacttactacacataagataattcatactggagagaaaccctacaaatgtgaagaatgtggcaaagcttttaaccagtcctcaactctttctaaacataaggtaattcatactggagagaagccctacaaatatgaagaatgtggcaaagcttttaaccagtcctcacaccttactacacataagatgattcatactggagagaaaccctacaagtgtgaagaatgtggcaaagcctttaacaactcctctattcttaacagacataagatgattcatactggagagaaactctacaaacctgaaagttgtaacaatgcttgtgacaacattgcaaagatttccaaatataaaagaaattgtgctggtgagaaataatagaaatatgaatgtgacaaagcctttaaatggttatcacactggattgtaggtaaggtaattcattctggagaaaacttctacaagtgtgaatgaacagtgtggcaaaacttacacaatgctcaaaccttattgcacaggaaagcctttatacttgagaacaaatgtacaaatataaagaaagtaaaaaagtgattaatatctgtgcacatcttattcaacatcagagtttatattaatagcattaaaagtgcaattactgtcaaaagagttcaaaaaataagcatttaaagtgctgaagaggatttattttgaagacaaacattacaaatataaacgaagttgtggtaactttacttgtaacacagatcttgttgtattcattctgtattagagcaaaccctgaggcaattgctcaaactttgttcaacatcagagaatttatatcgaagaaaaaccctgtaaatgtaataaatttagaaaaaaacatttattcaaaaactacaggttagaaaattccagagagttcatattaaaatatttttgcatatacagtaaatagaaaaaaatatttaattcaatggtaagtttatgtaaatatcagagaatttatgttagaaatatataaggcaatgacacttcagactttacactgaatcagagttctgagtttagaaagtaatccaaaactaaacttggcagaaaaattatttgtttataactttaaaagagtagaagattttttggagagttacaagtatacttttttttagaaagattacagattttttttaaaagtaaataactctcaaattacttcatacaaataatgttgtaattaactcaaattacttcgtgttaatgttgtaattaactctcaaattacttcatgctaaggaaattagtttttctttttcttcttctttttttttttttttttagatggagtcttgctctatcgcccccccaggctggagtacagtggcacgatctcagctcactgcaacctccgtctccagggttcaagtgattctcctgcctcagcctcccaagtggctgggattacaggcgcaaaccaccatgcgtggctaaattttgtatttttaatagagccagggttttgccatgttggccaggctggtctcgaactcgagactttaggtgatccgcccagcttggcctcccgcaatgctgcaattacaggtgttagccactgcgcctgcctgatgttgtttctttattcctattgtattcatatgtgaaagcatgtgaccaaaagatatgaggattattttttattaggtgagcatttatgacctcttctatgaaagagtaaggacattaaaatgcatgatgaaaatctaagtaaagaggttctttgtgattcacttacagtactgagtgatgcatgaggtaggtgttctgagtaatattctgcattatattgagagacaaatttttagttttagttaaaattaaaaataaattagtatattattttactaattttacttttatgaaaatgcagtacatgttaaaaattttagattatgtgtgaacttaatttcttaattcaacatttttaacagtttaaatattgtgcattcaatcaagtcacattattccacttactttaacctagtccaccttactcaagggtgtaggtaaaaggtggtaacaaggccgggcacggtggctcacgcctgtaatcccagcactttgggaggcaaaggtgggtagatcacctgaggtcgggagttcaagaccagcctgaccaacatggagaaacgccatctctactaaaaatacaaaattagccaggcatggtggcgcatgcctgtaatcccagctactcgggaggctgaggcaggagaatcacttgaacccgggaagcagaggttgcggtgagccgagatcatgccatggcactccgtcctgggtgacaaagtgagactccctctcaaaaaataaataagtaaataaaataaatggtggtaacaatacactatttggtaaaagaatgcactaacatctgtagtactaatcttttttccagtggctttaaactgcaaataaggaatgttgtttctgtaggtaaaatttttatttattttttcccatttaaatttacttttgttagttttttcaggcatataatatttatgttatatatggcatattctgataagaggcatacaatatgtaataatcacattagggtaaatgaggtatccatcacctttagaatttattttttgtattatgaacagttcaattgtacagttttagtttttttaaaatatacgattgttattgactacagggttatttttataataaaaattatatacaagtataaaatttacacatttctgagtcctgaataaataaaaataatttcttgtatatttttctttgaatatgtggcctctctacttgcaaacagatacaggcttttagttttgatttacatagagttaaatgtacacatctattagtctaaatataaaccttaggtgtaagaagattatggattaagtgtgtttgagtatgagtttgtaactattttcagaataatattggaacaagacatcattttaataaggtgtctaattttcttttcttttttcttttttttttttttttggagacagaatctcactctgttgcctaggctggagtgcagtggcgtgacctccgctcactgtaactctgcctcctgggttcaagcagttctcctgtttcagcctccctagtaggtaggactacaggcgcaggccaccatgcccagataatttttgtatttttagtacagatggggtttcatcattttggtcaggctagtcttgaactcctgacctcaggtgatccacctgcctcaatcttccaaagtactaggattacaggcgtgaaccactacacctggtcaggtgtctacttttttagaaaacaaaaatcctcaaaaatgaatgcaaatctatactctggtttgtattgaattttactgtataattttacggcttatggttcagaatcttgccattcaaattctcttgttttcacttgtctggtactcatgctaggcccataaatttcttgtttctgatatatatttgttgttttatagtttatgaggtattcattttgtgagctgctctgtgattataagaatgattttaatgaaatttagttatgggctgggtgcagtggctcacacctataatcccaacactttgggaggccgaggtgggtggatcacttgaggtcaggagttcaagatcaacctggccaacatggtgaaacctcatctctaccaaaaataacaaaaattagccaggcatggtggcatgctcctgtaatcccagctactgggaggctgaggcaggagaatagctttaacccgggagacagaggtcacagtgagccaagattgtgccactgcactccagcgtgggcgacagagcaagactccacctcaaaataaaataaacttagtcatgtacacaaaataatttttagctgtaattctaaaattagtgcattaaattttatttagttggaacatttcatttaattggagaaccctatataagcctacttttcgtatgttattttttttcactttttgtgatggatataagtaaatttattcattaggcgatttgttcaggtaagtactagggaagcttcataagtcgagaatgtttttatacataaatgtagcaaacaaacatgacagtgcttgctgtataacagatgctccataataaggcataaatactcctgtgaaagttgcaaacttcaagtcaggtggaaaatatcaaaggtaaacaaataacattgattcttcatgtggaggggacattttattttttttcaggctgcaaagctgaattttgctgaatttaaaaagaaattctgcttcatttattttctaattatcttaagctttgtctttttatgtgtattccacccacgtatacatcatagcccttctttttctgtgttaatggctgcagttatcccactgtttttttcatgccatgtcatctcacatggtattttgtgggttttgatgagaactttggtattttttaatggactgaaaaaatggttttaactggagagtttgcttatcaatataactttcagatcagttaattaagataaaaggcatacatgtccacaggcgagaggattaaatcagttagtgttgtgctgctttctttgtaaaaagaaaaaatattgttagaaaaagagtcttactagattcttacccaaagtgtgacaaatacaaaatttcctagaaaatatagaaattagaattttagagagtttatggtaagtgaaccatattaaattattattttttaagacagagcctcactgtcacccaggctggagtacagtgtcacaatctgggctcactgcaacctacatcttccaggttcaagcagttctgcctcagcctcccaaatagcggggattgtaggcacccgccatcatgcctggctaatttttgtatttttgtagagacagagtttcaccatgttggccaggctggtctcaaaactcctcgtgatccgccagcctcagcctcccaaagtgctgggattacaggcatgagccaccgcgcccagcaaagaaaactaatttgtatgaaagaataaaagagcccaaatagtcaaggcaacgtcagaaaaaaaaaaaaaaaaaaaaccagaggcctcctattacctgatttaaaattgtactacaagctacagtaaccagtattacatggttctggtatgaaaatatacatttagatcaatggagaagagaaagccctgaaatctgcacttttacaaccaagttaattttcacaaagcccacagaaattaacaaagggaaaataactgcctatttaataagtgggggctggatgcagtggctcacacctgtaatcccagaactttgggaagctgaggctggtggatcacgagttccggagttcgaggccagcctggccaacagggtgaaaccctgtctactaaaaatacaaaaattatccaggcgaggtagcaggcacctgtagtcccagctactcgggaggctgaggcagaagaatcacttgaacctgggaggtggagattgcagtgagccaagatggcgccactgcactccaccctgggtgacagagtgagactttgtttcaaaagtaataataataataaatggtacagggaaaactggttatgtgcagaaaaaagtggactcctacctctttccatatagaaaatgcaagtcaagatagattaagaacttatctgtgagtcttcaagctacacaaatcctagaagaacatttagaaaggactgctgtagacactggcctctggaatgaatttatgaataacatcttaaaagtgcaacaacaataaaaatcaaaaatttgcatctaattaaactaaagagcttccgcacagccaaagaaactatcaacaaaggaaacataccttacaatgtgaaataaaatatttgcaaagtgcatacaactgattaatatatcgaatcttaagaaatttaatttgacaaagcagaaaatatcgacacttctcaaaggaagacgtaagagttgccaataaacattcaaaaaatgcttaacatctgtaatcatcagagatgtaaatcaaaatgacaatatgataccatttcacaccagttagaatggctgttatcataagtcaaaaaattacatgttgaagttgtggagaaacagctttctgtttcaacttcatcctgacttcaggagaaacgggtgcctataaatcttagattggataagaaaaatgaggtacttacagactgcaatactatgcagtcacagaaaagagtgaaataatgtcctttgtggcaacatgaatgcagcagaaggccattaatgtaagcaaattaacagagatcagtaaaacaaataccacatgttctcacttatatgtgggaggtaaacattggatgctcatggaaacaaagatgaaaacaataaacactgggaattccaaaaagatggaagaagaaagggagacaaacgctgaaaaactacttaccatgtgtagtgtacactgcttgggcaatgggatagttaaaagtgtccaaacttcaacaccatgcagtatacctatgctaccaatctgcaggtgtattccctgaatctaaaatagaaataacaagatgttttgtggtataatgaaatgttatatttctgtagttccaagttaatagttggaattagcagtgaaagaattatttactccttaaggcataggggtaaatgtttctatacccagtctccccacattttgtaagctatcttctctgaaagctcttggcctatagcccaagatgtcttttattcccaagtgtgcagttaaaatagatgactctggatttaagggaggttccaagatggccaaataggaacagctccagtctacagctcccagcttgagtgacacagaagatgggtgattttctgcatttccaactgaggtactgggttcatctcactggggcttgtcggacagtgggtgcagcccacggagagtgagccgaagcagggcggggcaccacctcacccgggaaatgcaaggggttggggaattccctttcctagctaagggaagccatgacagatggtacgtggaaaatcgggacactcctaccctaatactgtgcttttccaatggtcttagcaaacagcacaccaggagattatatcccacgcctggctcggagtgtcccgtgcccacgaagcctcgctcactgctagcacagaagtctgagatcaaactgcaaggctgtagtgaggctgggcaaggggcatctgtcgttgctgaggcttcagtaggtaaagtggctgggaagctcaaacggggtggagcctaccacagctcaaggaggcctgcctgcctctgtagactcccacctctggggccaaggcatagccgaaaaaaaggcagcagaaacttctgcagacttaaacgtccctgtctgacagctttgaagagagtagtggttctcccagcacagagtttgagatctgagaatggacagactgcctcctcaagtgggtccctgacccccaagtagcctaactaggcaacacctcccagtagggactgactgacacctcatatggccgggtgcccctctgagacgaagcttccagaggaaggatcaggcagcaatatttgctgttctgcagcctccactggtgatacccaggcaaactccaacagacctgcagctgagggtcctgactgttagaaggaaagctaacaaacagaaaggacatccacaccaaagccccatctgtacgtcaccatcatcaaagaccaaaggtagataaaacccacaaagatggggagaaaccagagcagaaaagctgaaaattctaaaaaccagagtgcctcttctcctccaaaggaaagcagctccttgccagcaacggaacaaagttggatggagaatgactttcacgagttgagagaagacttcagacgatgggtagtaataaacttcttcgaactaaaggaggatgttccaacccatcacaaagaagctaaaaaccttgaaaaaagattagacgaatggctaactagaataaacagcatagagaagaccttaatgacctgatggagctgaaaaccatggcaagagaactacgtgacacatgcacaagcttcagtagctgatttgatcaagtggaagaaagagtatcagtgatcaaagatcaaatgaatgaaatgaagtgagaagtttagagaaaaaagagtaaaaagaaatgaacaaagcctccaagaaataaggactatgtgaaaagaccaaatctacgtctgattggtgtacctgaaagtgacggagagaatggaaccaagttggaaaacactcttcaggatattatccaggagaacttccccaacctagcaaggcaggccaacattcaaattcaggaaatacagagaacaccagaaagatactcctcaagaagagcaactccaagacaattgtcaggttcgccaaagttgaaataaaggaaaaaatgttaagggcagccagagagaaaggtcagcttacccacaaagggaagcccatcagactaacagtggatctcttggcagaaactctacaagccagaagagactgggggccaatattcaacattctttttttttttttttttttttttgagacggaatcttgctctgttgcccaggctggagtgcagtggcatgatgtcggctcactgcaagatccgcctcccgggttcatgccattcttctgcctcagcctcctgagtagctgggactacaggcgccaccaccatgcccagctaattttttgtatttttagtagagatggggtttcactgtgttagctaggatggtctcgatctcttgacctcatgatccacccacctcagccttccatagtgctgggattacaggtgtgagccaccgtgcccgactcaacattctcaaaagaattttcagcccagaatttcatatccagccaagctaagcttcataagtgaaggagaaataaaatcctttacagacaaacaaatgctgagagattttgtcgccaccaggcctgccttacaagagctcctgaaggaagcactaaacatggaaaggaacaaccggtatcagccactgcaaaaacatgccaaattgtaaagaccatcaatgctaggcagaaactgcatcaactaaccagcaaaataaccagctaacatcataatgacaggatcaaattacaatatttaccttaaatgtaaatgggataaatgccccaattaaaagaaacagactggcaaattggataaagagtcaagacccatcagtgtgctgtattcaggagacccatctcacctgcagagacacacataggctcaaaataaagggatggaggaagatctaccaagcaaatggaaaacaaacaaaaaaagcgggttgcaatcctagtctctgatgaaacagactttaaaccaacaaagagcaatagagacaaagaaggccattacataatggtaaagggatcaatgcaattagaagagctaactatcataaatatatatgcacccaatacaggggcacccatattcataaagcaagtccttagagacctacaaagagacttagactcccacacaataatgggagtctttaacacccccctgttgacattagatcaacgagacagaaagttaacaaggatatgcaggaattgaactcagctctccaccaagcatacctaatagacatctacagaactctccgccccaaatcaacggaatatacattcttctcaacgctacatcgcacttattccaaaactgaccacatagttggaagtaaagcactcctcagcaaatgtaaaagaatagaaattataacaaactgtctctcagaccacagtgcaatcaaactagaactcaggattaagaaactcacttaaaactgctcaactacatggaaactgaacaacctgctcctgaatgactactgggtacataacaaaatgaaggcagaataaagatgttctttgaaacaaatgagaacgaagacacaacagaccagaatctctgggtcacatttaaagcagtgtgtagagggaaatttatagaactaaatgcccacaagagaaagcaggaaagatctaaaattgacaccctattgtcacaattaaaagaattagagaagcagccgggtgcagtggctcatgcctgtaatcccagcactgtgggaggccaaagcgggcagatcatgagatcaggagatcgagaccatcctggctaacacgatgaaaccccatctctactaaaaatacaaaaaaaaaaaaaaatgggccacacgtggtggcaggcgcctgtagttccagctacttgggaggctgaggcaggacaatggtgtgaacccgggaggtggagcttgcagtgagctgagatcgtgccactgcactccaaccttggcgacagagcgagactccgtctcaaaaaaaaaaaaaaaaaaaaaaaaaaaaaaactagagaagagcaaacacattcaaaaattagcagaagtcaagaaagaactaagatcagagcagaattaaaggagatagagacataaaaaaaccctttaaaaaaatcaatgaatccaggagctggttttttgaaaagatcaacaaaattgatagaccgctagcaagactaataagaaaagagagtagatgcaataaaagatgataaaggcgatatcaccacagatcccacagaaatacaaactaccatcagagaatactatgaacacctctacacaaataaactagaaaatctagaagaaatggataaattcctggacacatgcaccctcccaagactaaaccaggaagaagttgaatccctgaatagaccaataactggctctgaaattgaggcaataattaatagcctaccaataaaaaaaagtccaggaccagatggattcacagccgaattctaccagaggtacaaagaggagctggtaccattccttctgaaactgttccaatcaatagaaaaagagggaatcctccctaactcattttatgaggtcagcagcatcctgataccaaagcctgacagacaacaagaaaagagaatttagaccattatccctgatgaacatcgatgcaaaaatcctcaataaaatactggctaaacgaatcctgcagcacatcaaaaagcttatccaccacgatcaagttagtttcatccctgggatgcaaggctggttcatcatacgtaaatcaataaatgtaatccatcatataaacagaaccaaagacaaaaaccacatgattatctaatacatgcagaaaagacttttgacaaaattcaacagcccttcatgctaaaaactctcaatcgactaggtattgatgggacgtatctcaaaataagagctatttatgacaaacccacagccaatgtcatactgaatgggcaaaaactggaagcattccctttgaaaactggcacaagacaggaatgccctctctcaccactcttattcaacatagtgttggaagttctggcctgggcaatcaggcaagagaaagaaataatgtgtattcaaataggaaacaaggaagtcaaattgtccctgtttgcagatgacatgattgtatattggtctcagcccaaaatctccttaagctgataagcaacttcagcaaagtctcaggatactaatgtgcagaaatcacaagcattcctatacaccattaacagacgaacagccaaatcatgagtgaaatctcattcacaattgcttcaaagggaataaaatacctaggaatccaacttacaagggatgtgaaggacctcttcaaggaaaactacaaaccactgctcaacgaaataaaagaggacacaaacaaatggaagaacattccaggctcatggataggaataatcagtatcgtgaaaatggccatactgcccaaagtaatttatagattcaatgccatactcatcaagctacaaatgactttctgcacagaattggaaaaaactactttaaagttcatatggaaccaaaatagagcccacattgccaagacaatcctaagccaaaagaacaaagctgggggcatcacgctacctgacttcaaactatactacaaggctacagtaaccaaaacaacatggtactagtaccaaaacagagatatagaccaatggaacagaacagagccttcagaaataataccacacatctacaagcatctgatctttgacaaaccagatgaaaacaagaaatagggaaaggattccctatttaataaatggtgctgggaaaactggctagccatatgtagaaagctgaaactggatcccttccttacaccttatacaaaaattaatttaagatggattaaagacttaaatattagacctaaaaccataaaaaccctagaggaaaacctaggtaatgccattcaggacatgggcatgggcaaggacttcatgactaaaacaccaaaagcaatggcaacaaaagccaaaattgacaaatgggatctaattaaactaaagagcttctgcacagcaaaagaaaacaccatcagagtgaacaggcaacttacagaatgggagaaaatttttacaatctactcatctgacaaagggctaatatccagaatctacaaagaatttaaatttacaagaaaaaatcaaacaaccccatcaaaaagtgggtgaaggatatgaacagacacttttcagaagaagacatttatgcagccaacagacacatgaaaaaatgctcatcatcactggccatcagagaaacgcaaatcaaaaccacaatgagataccatctcacaccagttagaatggcaatcattaaaaagtcaggaaaaaacaggtgctggaggggatgtggagaaataggaacacttttacactgttggtgggagtgtaaactagttcaaccattgcagaagacagtgttgcgattcctcaattaccatttgacccagccatcccattactgagtatatacccaaaggattataaatcatgctggtataaagacacatgcacacatatgtttattgtggcactattcacaatagcaaagacttggaaccaacccatatgtccatcaatgatagactggattaagaaaatgtggcacatatacaccatggaatactctgcagccataaaaaaggatgagttcatgtcctttgtagggacatggatgaagctggaaacatcattctgagcaaactatcacaaggacagaaaatcaaatgccgcatgttctcactcgtaggtgggaattgaacaatgtgaacacttggacacaggatggggaacatcacacactggggcctgtcgtggggaggggggcgtgttgaggcatagcattaggagatatacctaatgtaaatgacgagttaatgggtgcagcatgccaacatggcacatgtatacatatgtaacaaacctgcacgttgtgcacatgtaccatagaatttaaaatataataataataatatcaggaaacaacaggtgctggagaggatgtggagaattaggaacacttttcggtgttggtgggagtgtaaactagttcaaccattgtggaagacagtgtggcaattcctcaaaggatctagaactagaactatcatttgaccaagtcattccattactgggtatatgcccaaaggattgtaaatcatgctgctataaagacacatgcacacatatgtttattgcggcactattcacaacagcaaagacttggagccaatccagatgtccatcagtgatagactggattaagaaaatgtggcacatatgcatcatggaatactatgcagccataaaaaaggacacgttcatgtcctttgtagggacatggatgaagctggaaaccatcattctgagcaaactatcagaaggacagaaaaccaaacaccatatgttctcactcataggtgggaattgaagaatgagaacacttggacacagggtggtgaacatcacacactggagcctgtcgtggggtgacgggagccgggagggatagcattaggagatatacctaatgtaaatgatgagttaactggtgcagcactccaacatggcacatgtatacatatgtaacaaaccttcattttgtgcacatgtaccatagaacttaaagtataatgataataacaatagtgataaggtcaggaaacaacaagtgctggagaagatgtggagaaataggaacacttttacactgttggtgggactgtaaactagttcaaccattgcggatgacagtgtggtgattcctcaaggatctagaactagaactaccatttgactaggtatatacccaaaggattataaatcatgctgctataaatacacatgcacaagtatgtttattgcagcactgttcacaatagcaaagagttggaaccaatccaaatgtccatcaatgatagactgaattaagaaaatgtggcacatacacaccatggaatactgtgcagccataaaaaaggatgaggtcatgtccattgtagggacatggatgaagctggaaaccatcattctgagcaaacagtcacaaggacagaaaaccaagcaccgcatgttctcactcataggtgggaattgaacaatgagaacacttggacacagagtggggaacatcacacactggggactgttatggggtgtgaggaagggggaggtatagcattaggagatatacctaatgtaaatgacaagttaatgggtgcagcataccaacatggcaaaaaggaaatataggcaggcaaaaaaagattacaggatttttactcactttcgtcaccctatatctaaaatatgacataatttgttcccaaatatttgttttatgtatcagaggctctgaccatattctgcaaaatagataatttttttctttatttagcaatgtaaggctattctttgcttctaaatttggattacagcagtttttttgtgtaagaatagcatatatttacaacttaaaaatgatcttatttattaaaatgcttatttatcagtttgtcattagaatcttgtttatgattatactacattttatctgaaattatactgcattacaatggatgccagtgattcaaaatagccaccttcaatgagtacacagttacagtaaaatattacagctatctacacgaattctttattaatgctacatcagtgttgcataccagattttatgagtaaacatttcttttattattattttgtagttccatttcagtgttttttttttcagtgttagtttcttaatataagtttattgtgttttttggttttatagttttagacaatttgcaattctgtttgtatacctaagtcagtgtggagtttaagagattaatcagccatattgtctgttaaaatctgattatatgtgtgtgtgtttttaatctataaatatgaccccaattttggttatggctaatcttgtatatattttttcttagctgatttttaatggtgtctttatcttgtctaaatgggtagtcatggaaatagtcttattttcaccttgttataataaacatatatttcctttgtgtgagagaagcacttttgtgacttgaaggtaatttttggagagatttataattctgtatcttcttcagttattcttttaaaaaataattgtacaaacacataacctaaaatttaccatcttaaatctatttaagtgtacatttcatggctagtcgtggtggttcacatttgtaatccccagattttgggaggccaaggcaggaagactacttgagcccaaaagcttgagaacatcctgggagatatgtggagaactcatctctataaaacatttttaaaaatagccagacatggtggtgtggtcctatctacttgggagattgaggagggaggattacttgaacatggaagtttgaggctgcaatgagccataattgtgccgtggaccccagcttgggtcacagagtaagaccctgactcaaaaacactgtacgtttcagacatgttaagtatatttacattgtttttagaaaagacttctagaaattttacaatacacattagacaactaccagtttttcccatttcctggcacttttgaaacaccattctgttttctgtttctaagagtataactgctttatagatctctcatacaatttctgttagttgttagaatatgtcctgcttttttgcaaattgagtaattctttggtatttttatattttaaattatatctgttgaacgatttggtgacagaaatttgcattgcttttacctattggcttttagtaacaatgctaaaataattgtgggtatgcaaatgactcttcatgtgaccatatatgtgagagtttatgtatgtgctgcattctattttattagtctactttttcacctttatactcataccaaattgttttaattctgtaggtttgtaatgtgttttgaaatcaggaactgtaatgcctccaacattgttttattttgtttttaatatttttgggcactttgtagagattctatgtacttgagggattgctgtttttctttcatcaaaaatgcagtgagaaatttgaaaaacattgcattaaatctgtagattgcattgagcaggatggacatctttacaatgttgcctttttcagcctttcacaagagcacgctcaagagtgtattgtttaatttccatatatgtgtgaatttttcaggttttttattttcttaattgttgtatactcatttcattttggtgatagaaagtaatttataaaatttcagttttaaaaaatttggtaagatgacttttttttggcataagaagtggtctatcaaggaaagtgttgtgttagctattgagaaccatgtgtgtcctgatgttgaggagtgttttttatacctgtgttaggaataattgttgcctgcaagtcctctattcccttactaatattcttattttatttttattacagaaagtgcagtattgaaatatcctactataattatgttgctctctctgtgtctctgttattctgtcaatatttgctttatatttgaagccctaatgtgagatacacacacacacacacacacacacacacacacacacacacacgtacatatatacaaatttgttataggttcccagtgaataaatctatttttttttttttttttttgagacagagtctcattctgtgtcccaggctggatggagtgcagtggtgtgatctcggctcactgcaacctctgcctcctgggttcaagtgattctcctgccttagcctcccaagtagctagtattataggtgcccaccaccatgcccagctaatttttgtatttttagtagagatggggtttcactatgttggccaggccagtctcgaactcctgacctcaagtgatccacctgcctcggcctcccaaagtgctgggattacaggtgtgagccaccgtgcccagcctaaatctgtaagttttatgtccttttttgtctccttggagttttgacttcaaatacattttataaaatatgacagtttttgactaagatgtaggttgcataatattattttgatttcttctgctctcatttgattaacacttgcatgaaatgtattcttgcatcgtccccctttcagtgtttttttatcattagatctcaactgacttttgtagaaaaaaaagttggatcttggtttttaaaattttaaatctatttattgaaagtatgtctcttgatttgaaagttaattttatatatatttaaataattttctgaaagagacttactgttttaattattttatttgattcttgcatctttgtttctcattttctcttgtgtctttttgatttttgtattgatatgcttttacttatttctaattcactgttgtgtatctatacagattttttttgtgtgtgtggtgccttgggggttacagataacctctataagaaacaacagtatatttttaatttggtataaaataaacttcagttgaataaaaaattcttcctcattacatctgccctgaaatttgtcattgatgttgccaattatgtttttacattgtatattcattaacagatgtttaatttctgtgcttttatttttcaaattttagagaatagattaaaatattttctgcaccattatgataatgccacaagattctatttttgtgtatgtgcatatctttcccagaaaataatgtatttgtatttgattatgtggtattttctcaaattcttttactttcagtttaaagaactgctttcagcgtcttttatatgtagggcatatgcagtgctaataatatactttttcataatttgttttttttttttggaaggttttttctttttatttggtagggcagatttgttgatggtattattctcacttggtagattttttttttttttcaggactttgactgtgtcacacagtttctttctggcctgcaaaattcttgttgataatttactggttataagactatgtttgtaaatgacacattgcttttatcttgcagcttccaagactttcttcttgtctgtgatttttgaaaatgtgcttataaatgtatttgttataaatatctttgtgtgtttcctaatttgtttgttgaacttcctcatttttacatcatttttttcctacttttaggattttccagttatttatttttctgttttttttacctacaaatttaaaaaaaaaattgtagatactttcgtttttattctcatttttctgattcttttttttttttttttcgtttgagacagagtctcgctgtgtcgcctaggctggagtgcagtggcgcgatcttggctcactgcaagccccgcctcccaggttcatgcagttctcctgcctcagcctcccgagtagctgggactacaggcgcctgccaccacgcctggctaatttttttgtattttttttttttagtagagacgggttttcaccgtgttggccaggatggtctcgatctcctgacctcgtgatccacccacctcggcctcccaaaatgctgggattacaggcgtgagccaccacgcccagcccatttttgtgattttctacactgggccgtgttcctgtttcactcattgaatattattcaatttattatcagtgtttaaaattaatgtgtacatcttttttatggtttctttctgaaatttatacaatatttttgatgagactatattgccttgttttgtatacattgtaatctttgattgagatttggacattaaaaagctacctgtcacagtctttaaaatgtagttttttctgacatagtctgaaaataattatcttggctagagattctgagagtctctcaaacatgttcttaggatgtgccttgtctaaaattttgtatttagtttttagttaaagcagtttattattcatgtttctttcttcttctttttttttttttttttctgagacacagttttgctcctgtcacccagcctggagggcagtggcatggtctcagctcactgcagtctccacctcccgggttcaagtggtcctcttgtctcagcctcccacatagctgggattacaggcatttgaccccatgctcagctaattttgtatttttagtagagacagtgtttcaccatgttggccaggctggtctcgaactcctgacctcaggtgatccacccacctcggcttcccaaagtgctaggattacaggtgtgagccaccatgctcagcctgttcatagttcttcttaataaccaataatcacttgctataattgttacctgtctatgatatcacagtctttctgctgctgtaaaacttatctttcatttcagcagactcaaactgtcatttgaaagaatacctctatttctttcagaactttatgtaatgagggacaggaaccagtgtctgtaaaagcccctaccattcagaaataaagatgtataagccagtattttacttgtcttttaaaaaggaaaccaggaattggcaatttatttctaaagtcactatgttttattgggaagcaggaacatctgtgttgggtaaatggaactgacttttcctctatgtggctgtttgcattgggctcacctggggcactgcacacttaacttactttaatttttcacaaatgtaatttggtctgtatgtttttgttacattatatgtctgtgaaaaagttagagcctgtaatattttgctacttgtgatgtagtttgtataattttataggttagatttgtaaagtatattcatctgtatctagtaagtggagtaattgattatttttatttcttgcagttgtatgttcttattttgcccaagacttttggccaaagcagggcataaaaaattgtttccaaaaagtgatactgaaaagatataaaaaatgtggacatgaaaatttacagttaggaaaatactgtaaaagcatggatgagtgtaaggtgcacgaagaatgttacaatggacttaaccagtgtttgagaactacccagagcaaaatattacaatgtgataaatatgtgaaagtctttcataaattttcaaattcaaacagatataagataagacatactggaaagaaacctttcaaatgtaaagaatgtgaaaagtcattttgcatgctttcacacttagctcaacataaaagaattcatactagagagaaaccctacaaatgtaaagaatgtgggaaagcctataatgaggcctcaaacctttctacacataagagaattcatactggaaagaaaccctacaaatgcgaacagtgtggaaaagcctttaaccggctctcacaccttactacacataagataattcatactggaaagaaaccctacatatgtgaggactgtggcaaagcttttaaccaatctgcaaaccttactacacataagagaattcatactggagagaaaccctacaaatgtgaagaaagtggcaaagcttttagccagtcctcaacccttactacacataagataattcatgctggagagaaaccctacaaatatgaagaatgtggcaaatcttttaaccaatcctcaacccttactacacgtaagataattcatactggagagaaattctgcaaatgtgaagaatggggcaaggcctttagccggttatcccaccttactacacataagagaattcattctggagagaaaccctacaaatgtgaagaatgtggcaaagcttttaaacaatcctcaacccttactacacataagaggattcattctggagagaaattctacaaatgtgaagtatgtagcaaagcctttagccggttctcacaccttactacacataagagaattcattctggagagaagccctacaaatgtgaagaatgtggcaaagcttttaacctatcttcacaccttactacacataagataattcatactggagagaaaccctacaaatgtgaagaatgtggcaaagcttttaacctatcttcacaccttactacacataagataattcatactggagagaaaccctacaaatgtgaagaatgtggcaaagcttttaaccagtcctcaactctttctaaacataaggtaattcatactggagagaaaccctacaaatgtggagaatgtggcaaagcctttaaccagtcctcacaccttactacacataagataattcatactggagagaaaccctacaagtgtgaagaatgtggcaaagcctttaacaactcctctattcttaacagacataagatgattcatactggagagaaattctacaaacctgaaagttgtgacaatgcttgtgacaacatctcaaacatttccaaacataaaagaaattgtgctggtgagaaaacatagaaatatgaataatgtgacaaagcctttaaatggttatcacacttgtttgtaagtagggtaattcatactggagaaaacatcacgagtgtgaacagtgtggcaagacttaaacaatgctcacaccttattgcacaggaaagcctttatacttgagaacaaatgtgcaaatataaagaaagtaaaaaagtgattaatatctgctcacatcttaacatcagagaatttatacttaatagcattaaaagtgcaattactgtcaaaagactcttgagaaaatgtaagcctttaaagtgctgaagaggatttattttgaagacaaacattacaaatataaagagagttatagtaactttacttgtaacacagatcttgttgtattcattttgtattagagcaaaccctgaagcaattactcaaactttgttcaacatcagtgaatttgtattgaagaaaaaccctgtaaatgtaataaatttaggaaaaaaacatttattcaaaaactacaggttagaaaactccagagagttcatagtaaaatatatttttgcagatgcagtaaataagaaaaaaaaatttaatccaaaattgtctatgtaaataccagagaatttacattagaaatatataaggcactgacacttcagattttacactaaatcagagttctgagtttagaaaataatccaaaactaaagttgggagaaaaattatttgtatataactttaaaagagtagaagattttttggagagttataattacattacaagtatactttttttggaaagcttacagattttttaaaaagtaatgtaattaactctcaaattacttcatgtaaataatgttgtaattaactcaaattacttcatgctaaataaattaatttctttcttttttttttttcttttaagacagagccccactctgtcacccaggctggagtgcagtggcgctttctcggctcactgcaacctccgtcttcagcattcaatgattctcctgcctcagcctcctgagtagctgggattacaggcacacaccaccacgcccagctaagttttatatttttagtagagctggggttttgccatgttggccaggctggtctcaaactcgtgacctcaggtgatccgcccagcttggcctcccaaagtgctgggattataggtgttagccactgggcccagcccatgctgtttctcttttcctattgtattcatctgtgaaagcgtatgaccaattgttgctgcatcaaagatatgagagattttttttttaggtgagcatttatgacctcttcaatgaaagagtaaggacattaaaatgtaagatgcatgatgaaaatcttaagtaaagaggttctttgtggttcacttacagtattgagtgatgcatgaggtaggtgttcagagtaatattctgcattatattgagagacgaatatttttagttttagttaaaattaaaataatatattattttactaattgtacttttatgaaacaaaatgcaatacatgttaaaaattttatattatgtgtgaaaatttaattgaacatttttaacgttaaatattgtgcattcaatcaagtcacattattccacttaatttaacctagtccaccttactcaagggtgtaggtaaaagatcgtaacaatacactatttggtaaaataatggactaacatctctagtaatcttttttgccagtggctttaaactgcaaataagttaaggaatattgtttctgtaggtaaaatttttatttttttcccatttaaatttacttttgttaatttttgtgggcacataatatttatgttatatatggcatattctgataggcatacaatatataatttatactaataatcacattaggataaatgacgtatccatcacctctagaatttattttttgtattacaaacaattcagttctacagttttagatcatttcaaatgtataattaaattgttattgactacaggtttatttttataataataaaaattatatacaattataaacaaaatttacacatttttgagtcctgaataaatactttaaaaaatttcttatatatttttctttgaatatgtggcctctctgcttgcaaacacatacagacttttagttttgatttacatagagttaaatgtacacatctgttagtctaaatataaaccttaggtgtaagaaaattaataaggtgtctaattttctttttgattcttttttttgacagagttttgccctgttgcctaggctggagtgcagcggtgtgatatcggctcgctgcaacctctgcttcgcagggtcaagcaattttcctgtctcagtctcctgagtagctaggactacaggcccaggccaccacacctggacaatttttgtatttttagtacagacagggtttcatcatattggtcaggctagtcttgaactcctgacctcaggtgatccacccacctcagcctccgaaagtactagaattacaggcatgagccaccatgcccggccaggtgtccaattttctagaaaacaaaaatcttcaaaaatgtgaatgcaaatttctgctctctgctttgttctgaatttattactgtacaatcttatggcttatgattcagaatcttgccatgcaaattctgtttttacttgcctggtactcatgctaggcccataactttcttgtttcttatataagttttttgttttatggtttatgaagttttcattatgtgagctgctctgtgattatatgaatgattttaatgaaattgagtcatggaccgggcgcggtggctcacgcctataatcccaacgctttgggaggccaaggtgggtggatcacttgaggtcaggagttcaagatcaacttggccaacgtggtgaaccctcctctctactaaaaatacaaaaattagccgggcatggtggcgtgcacctgtaatcccagctactgggaggctgaggcaggagaatagctttaacccgggagacagaggttgtagtgagctgagattgcacctctgcactccagcctgggcgacagaggaagaatccatctcaaaaaaaaaagaaatttagtcatgcacacaaaataatttttacctgtaattctaaaattagtttgttaaattatattttatttagttggaacattccattttgttcttttaattggagaaccctatataagcctccttttcttaagttactgtttttttcactttttataatggatataaataaatttattcattgattgggccaatttgttcaggtaagtactagggaagcttcataagtcatgaaaatgtttttatacctaaatgtagcaaacaaacatgacggtgcttgctgtataacagatgctccataataaggcataaatactcctgtgaaacttgcaacttcatgttcagaggtagaaaatatcaaaggtaaacaattgattcttcatgtggcgagtacttttttttcaggctgcaaagctgaattttgctgaatttaaaaagaagttctgcttcatttattttctaattatcttaagttttgtttgtctttttatgtgtattccacccatgtatgcatcatagcccttcttcttcttctgtgttatggctacagttttcccactgttttcttcatgccatgtcatttcatacggtgttttgtgggttttgatgagaactgtgatattttttaatgcactgaaaaattggtttcaactggagagtttgcttatcaatataactttcagatcagttaattaagataaaaggcatacactgtccacaggagagaggattaaatcggttagcatggtgcttctttctttgtaaaaagaaaaagtattgtttgtaaaaagaaaatcatactagattcttacccaaagtgtgacaaatataaaatttgctagaaaatatatcatagaaattaaaattttaagagagtttatggtaagtaaaccatattaaatttaattttttctttttttttttttaagacagtctcactctgtcacccaggctagggtgcggtggcacaatctgggctcactgcaacctacatcttccagattcaagcgattcttccgcctcagcctccctagtagctgccccaagcttaaaataaagcactaaagtacattggctcctcccatgcactgtgctgggtttaaaacatgctgtcaagcctgggcgcggtggctcacgcttgtattccgagcactttgggaggccgaggagggtggatcacctgaggtcaggagttcaagaccagcctggccaaacatggcaaaaacgcatctctaatgaaaatacaaaaattagctgggtgtaacagcacactcctgtaatcccagctacacgggaagctggggcaggagaatcgcttgcacctgtgaggcggagattgcagtgagcagagatggtgccattgtattccagcctgggctacaagagcaaaactctgtctcaaaacaaacaaaaaaaacaaaacaaaaaccatgctgtcaagtatcaaaattcctgtggttatgactgacacatgataaaacagtacaaaaactattttttatactattcagccaagtttatgacaaagacacagacattatttgaaatactgttatctttctataaggttttagaaatgtattctctaacttgaaagagaaaatgtgtatttattctgtaaaacagcattttgaagtatatacaggtggtcagatgcttattagctttatgtaattaatgctttatctcaaatagttaacattttgatggtgagattacataacattgtcttagcattttttcaaacataacaaatgcaatattataaactatagtcgcaatgccgaacaatcttgaacttattcctcctatccaactatatgtattatttggcagatatctttcgaattcccccatttttaaaaataccttggcatctagtggtcaccgttttgttctccacatcaatgagattaagtttttttgaatccatgtgtaagtgaaatgagatactaatcattttgtaactggcttatttcaactaatataatgtccttcaggttaatccatgtgattgaaaatagaattttcttttaaatataaatagtattccattgtgtatatatgccatattgtctttatttacttattagatgttgaactgttgattgcataatttggctgttgggaagagtgctgaaagcaacatagaagtgtgaatatttcttcattctgattttgttttgaatacatacccaacagtgcaattgctgtattatatagtagtttgattttaagtttttttgagtaatctctattttgttattcataatggctgtcctcatttacattcaaaccaacagtgtgtaagcattttcttttattgacatctttaccaactaacacttttttcttttatttatttatttacttatttatttatttatttatttttgagacagtttcactgtgtcacccagcctggagtgcagtggtgcgatcttggctcacttacaacctccgcttcccgggttcaagcaattctcctgcctcagcctcccaagtagctgggattacaggtccctgccatcatgcccagctaattttgtatttttagtagagatggggttttgccatgttggccaggttggtctcaaactcctgacctcaggtgatccacctgccttggcctcccaaaatgctgggattacaggcatgagccattgcatccggcccttttttttttttcatttttagtaagcgtcattctaatgagtgagttgatatctcatagtcttttctggcttgctttccctaataagaattgacattcggctgggcgcagtggcttacacctgtaatctcagcactttgtgaggccaaagcaggcggatcacctgaggtcaggaattcgagaccagcctggcaacatggtgaaaccctgtctctactaaaaatacaacaattagctgggtatggtgacgcatgtctgtaatcccagctactcagtaggctgaggcaggagaatcgcttgaacccatgaggtggaggttgcagtgagacgagatcgtgccactacactccagcctgggtgacagaatgagactccatctccaaaaaaaaaaaaaaaaaaaagacattcagcatttttaaatgtatctatttgccatatgtatgtattttcttgaaaaatatgctttttgctttttttttttttttttttttttttttttttttttttagatggagtctcgctctgttacccaggctggagtgtagtggcgtgatccctcagcctcccaagtagctgggactacaggtgcctgccaccacgcctggctaattttttgttttttagtagagatgaggtttcaccatgttggccaggctgttctcgaactcctgaccttgtgatctgcccgcctgagcctcccgaagtgctgggattacaggcgtgagccactgtgcctggccagctcattttcaatagttatttgttttatgttgtatagtcatttaattttcttatatatttttgatattaataatgccttgtcccattttttagttattctgttgattgtattctatgcagcagcattttaatttgaagtattctgactcatttatttttttccttttgttccctgggattttgagtttaaatgttaatggggccttctctctggttttttttttgttcttgttgttgttttttgtttgtttgtttttgtagtagtaatggtagtttcagagtttcaggccttacatttaaatatctaatttattttgagtggatttttatatgtggtgtgagttagggtctccttttattgctctgcatttggccataaagtattctcaacataattttctgtctttttcctacgaaattgtcacctttatttaaaatcagttagctgtaagtacatggctatatttctggaatctttttttttgctccattggcctagtgtctgtttttattcaagcaccatactgtttttgttactgtacttttgtagtatatttcaaagtcaggtagggtgatagattcacttttttctgttagattgctttggctattgagggtcttttgtggtacaatatacattgtagatgtattttttaagaatttttattaagtatgtcactgatattttcattgaggttgcattatatctttaggttattttgtgtaatacaaatatttaacaatattaataatggcaattcattaatgattaactttttaattcatgtattaatttcttgaatgtttttagagtataatgtaaagtgcttcaaaattttgattaaatttattttaaagtatagttactacagttactgtagatggaattgttttttaaatttattttgagatagttcatagaaatgctactgacatttggatattggttttgtattccacatgtttaataaatttattagttttaatagtttttggtaaagtcttaggcttttcttaggattatgtatagggataaaagattattttttattatttattattttttgagatggagtttcactcttgtcacgtaggctagagtgcaatggtgcgatctcggctcactgcaacctctgcgtgccgcattcaagcaattctcctgcctcagcctcctgtgtagctgggattacacgcatgcgccaccacacccagctaatttttgcattttcagtagagatgggtttcaccatgttgtccaggttggtctcgaactcctgaccttaggtgatgcacctgcctcggcctcccaaagtgctggaattacaggtgtgagccacagcacccagcctgagataaaagattatcatacaatgataatttaactcctttttttccaatctggatgcctttgattttattctttattttctatgtcttggacatttagtactatgtttagtaagactgaagaaagtgcacatccttgacttgttttagctcttagagtaaaatcttacagcatttccctattcagtatgttaatacctgtgcattttttgttatatttgacatttattatcggaattaaccagacaaatcgctccaccaactaaacgccacttgtccctctaagaagttgggggacgccgaccgcaatctcaactcactgcaacctccgcctcctgggttcaagcgattctcctgcctcatcatcccaagtagctgggactacaggtgcctgccaccttccctggctaattttagtattttttagtagagacgaggtttcgccgttttggccaggctggtcccgaactcctgacctcaggtgatccacccgccttggcctcccaaagtgcccaaagtgctggcattacaggcgtgagccactgcacccagcctaacaatcatttttaataaaaattaacacattgaataattgaataattttcattgttgtatatgtgtgtaaatgtataaaatgatacttgaaaaaaataagccagaaaaagtatgttaatatttgtaataaaatgggaaggtagttaattattatttgcaaatgatatcttttgtttacttagataaaaaaagaaactataagactattttaacagtctattcaggtgggtagacaaaattctaagatgatcgccaggattcccaatctgttgcacacctgctgtgtaatcctctcctttggcgtgtaaagaaaatatgacttactgtcgtggaaaatcactcatgaaattaggttgctgatgtattgactttgtgttcatcaaaagggagattatcctgatagggctaaacttaatcagaggtgcttttaagagaaagacacgggccgggcgtggtggctcacgcctgtaatcccagcactttgggaggccgagacgggtggatcacttgaggtcaggagttcgagaccgcctgatcaacgtggtgaaacccatctctactaaaaatacaaaaattaaccagttagccgggcgttgtggcatgcgcctgtaatcccagctcctcaggaggctgagatgggagaatcacttgaacctgggaggcagaggttgtagtgagccaagatcacaccactgtactccagcctgggcgacagagcgagactctatcctccccaaaaaataaaaagacacattgtagaaaaacacccttgctggcctggaagtaagtgacttctaggtggaacaggttgtaagctgctcttggtggccacatggcaggaaacacgtttgtatattgtcatcattcctgccttccacatgttgcttccaatagggaggatcccaggacagagataaaaagggggtcttcttcatgcaaaaataatcacctctcatctgggatagcctaagataaacagaggagaccacaacatgagcaaatcaatgggaggaaaagggcaacctggttgaaagggctcactggcatgatggagcagcatttactaagttgtagtgaatgatcagcctctgggatagcaatagtcagccaaggaggctgaactcatttttattctcattaaatcagcatatctgcaccattctggtggcccagtgttacactacccattacaaaaataacacggagaccagtgggtaacttcctagaattgagcttatcatgaaaaagcatatctcattatttgttttcacaattgaaaagcctcgaaaacaatgaatttattaataatgaacttctgctcattttagaggattctacgttgtcatgtattaaactttaaacactttaatattaatgtcttgaatgcataaactatgcagatagtttaacacgataaaagtaacaattagaaaaaaacatttgaaatgggatagaatttatcaaaatcacatcttttcaatggcttggcataattgccgtgctttctgaagtggctagattattaacaagtagcaaagacaattttggttttgttcaatcattaagttcttgaccatttaaaatctaaaattctggctaaaggatttaaaggccgtattctttagtggcttcttagggtttcacaggcaatacaaaaagaattttgataggcagaaaaatgcattctacatatatacacagtgctcttctctagtttgcattaacattaaaagattgaagatttcaaatctagtctgtcagagtaaattgataaaagttgtatttttcagctaagcaaataattgaataaaataggtaacaatttgtcattagctgccaaaaaatagtatgaccagattcactaagtatctagccacgcaaacgacagcccaattaagtcaagatcctaacaggtgcgtgtggaaagcatttatgggcaatgtggtgcccctccactcagcaccttcttctgcccctttacagagatacaatttcccgagtgactcagggtgaatactaggagctgagaatgctgtattcagtttattaccgggaacataatcaacaaatttatttcatattataaaaattttatgaatcagtttggtgtggtggctcacacctgtaatcctagcactttgggagtcctaggtgggtggctcacaaggtcaagagatggagaccatactagacaacaaggtgaaaccccgtctctactaaaaatacaaaaattagctgggtatggtgacacgtgcccgtattcccagctacttgggagactgaggcaagagaatcggttgaacccgggaggcagaagttgcagttagccgagatcgcgctgcttcactccagcctggcgacagagtgagactccgtcccccccgccaaaaaaaaagaaatgaatactactctgcctcacaaaggcttttagtaaaagattgcatataatactcaatttggattcataaaaatttcaatattccaggtaaatcagcagcacttaaatgtcaaccaaatttcataaaacatatttcaatgagataagtctttttagctaagaattttattttattcgtaaatttagagaaaaatagaaaaccagtactttgagctaaataacagtgtttggcatgagagcaccatccaaacaagtgctcttcatgattaacatagcaatggcaccatgtgctctccttgagcaggccggcctgtttccactgatataaagtggagacggcattgaaatagtgagcgagggtgatataaatggaatatttatattaaatacagtttttaataaaaagcatttgatgttgtacagctacagatgaaattattagtatgaggccgtaatatttttacttctactgacaggataacttgattcacaatattcttatttcaaataatattcctttttttgctgtatatttgctagcttttggtccaaatattaccggaactcaatagaaatcaacaaaattcatctttattttaccacaagcattttgttattgatgcatatgcttattttgcttaaaaatccattagcttttgatgaaagatttgtacttttctttcagtgtgttgtttattgctgacaagtggctgtcctgccaggaaactgctgttctcagctctatccacactgacaaatagtgagtggaagtgaagtgtaagtaagaaccaaatgtgtcttctcttcatcagttttttcatccattggctgaaaaaagagaaagatgcagaaagatgaaagaagatatgatccctgaaagatcacatagaagtcctcttaatgagaaaaaaatggttgtgtgaccataaaatacattattttgctaagcctctgaaattttaatatacaacttgcattgctttcagtccttcagttttgatgcttcaggatatgacacaattccctggtgaatcaaaactgaaaagaataatttattaaggtaagagatacaggaaagacctcttacatttgaccaatatctccacccccagcctttttttttttttttttttttttttttttttttgttgagaaaaactttcgttcttgtcacccaggctggcgtacaatggggcgatctcagcccacggcaacttctgcctcctgggttcaagcgattcccctgcctcagcctcccgagtagctgaaattacagtcacgtgccaccacacccggctaattttgtatttttagtagagactgggtttctccatgttggtcaggctggtcttgaactcccagcctcaggtgatccacccacttagcctcccaaagtgctgggattacaggcttgagccactgtgcctttttttttttttttttttttttttttgagacggagtctcactcttgtccaggctggagtgcagtagtgcaatcttggctcactgcaacctctacctcccaggttcaagtgattctcctgcctcagtctcccaagtagctgggtttacaggtgcccaccaccccgcccagctaatttttgtatttttagtagagacggggtttcaccatgttgcccaggctgttctcaaactcctgatctcaggtgatccacctgcctcagcctcccaaagtgctgggattacaggtgagtcaccacacccggccgagttagaatttttttctactctacctagacatgagatcatgtggctcttccgagacattgtctgcaggcactcagaatggtccagcgtttgacataccaatgtaggcattcctacagtacagcctctaacaaaagtaggctgttccgaacccctggtaatagaatacctttataccaagaaggttggaaaagcatcaaaatctgcttgtggcatgtgcccaggcagacttcgaggggttcgtgctgtaagacttaaagttcttatgaaattgtccaaaacaaacaaacatgtcagcagggcctatggtggttccatgtgtgctaaatgtgttcgtggcaggatcaagcgtgctttccttattgaggagcagaaaatcgttgtgaaagtgttgaaggcacaagcagagtcttctcactcattttatttagctttgcagctaaataaaaagtgaaacttttttgagaaagaaaaaaaaatgagatcatgtggtatgtttttgttttcttttttctttgtgctggctcttttttttagtatttattgatcattcttgggtgtttctcacagagggggatttggcagggtcataggacaatagtggagggaagatcagcagataaacaagtgaacaagggtctctggttttcctaggcagagggccctgccaccttccgcagtgtttgtgtccctgggtacttgagattagggagtggtgatgactcttaacgagcatgctgccttcaagcatctgtttaacaaagcacattgtgcaccgcccttaatccatttaaccctgagtggacacagcacatgtttcagagagcacggggttgggggtaaggttatagattaacagcatcccaaggcagaataacttctcttagtacagaacaaaatggagtctcctatgtctacttctttctacacagacacagcaacaatctgatttctctatcttttccccacctttcccccttttctattcgacaaaaccgccatcgtcatcatggcccgttctcaatgagctgttgggtacacctcccagacggggtggcagccaggcagaggggctcctcacttcccagcaggggtggccaggcagaggcgcccccacctcccggatggggcagctggccgggcggaggcgccccccacctccctcctggatggggcggctggccgggtggggactggcccccacctccctcccggacggggcagctggccaggcgggggctgccccccacctcccggacggggcggctgccgggcggagacgctcctcacttcccagacggggtggctgctgggcggaggggctcctcacttctcagatggggcggccgggcagagatgctcctcgcctcccagacggggtcgcggctgggccgaggcactccatacatcccagatggggcggcggggcagaggcgctccccacatctcagacgatgagcggccgggcagggacgctcctaacttcctagatgggatggtggctgggaagaggcgctcctcacttcccagactgggcagccaggcagaggggctcctcacatcccagacgatgggcggccaggtagagacgctcctcacttcccagacggcgtggcggccgggcagaggctgcaatctcagcactttgggagtccaaggcgggcggctggaaggtggaggttgtagcgagccgagatcatgccactgcactccagcctgggcaacactgagcactgagtgagcgagactccgtctgcaatccccgcacctcgggaggccgaagctggcagattactcgcggttaggtgctggagaccagcccggccaacacagtgaacccccgtctccaccaaaaaaatacgaaaaccagtcaggcgtggcggcgtgcgcctgcaatcccaggcagtctgcaggctgaggcaggagaatcaggcagggaggttgcagtgagccgagatggcggcagtacagtccagcttccactcggcatcagaggaagaccgtggagagggaggaagagggagaccgtggggagacggagatgagggagagggagatggagagctgtgttggctctttttacttaggctaatgtcctacaggttcatcagtatcgttgcagataacaagatttctttatttttaagggctgaatagcattccattgtgtaaatacacgaaattttcttcatccattcacctgttgacacttaggttaacacttaggttgattctctatcttagctattgtgagtaacctacttccttctccttcatttgttttcatatctttttttttttctttctaaaagtattttaatttaaaatacaaattttgactgttaaatgccttcatttttctgccttcttttggataatattttggctaattttaaaaataaattttttaaaaagctcttgggggccaggcaccgtggctcacgcctgtaatcccagcactttgggaggccgaggcaggcagatcacgaggtcaggaggtagagaccatcctggctaacatggtgcaaccatgtctctactaaaaatacaaaaaattagccaagcgtggtagcacgcgcctgtaagtcccagttactagggaggctgaggcaggagaatcgcttgaacccgggaggcggaggttgcagtgagctgagattgcaccactgcactccagcctgggtgacagagtgagactccatctcaaaaaaaaaaaaaagaaaaaagaaaaaaattcttggatcaaggttattacttcattattaacataatttgagacaaaatagcgataaaaataaacattgattagtgaaacaacaattgtctagcccctggtaatcatttcctctctcacccaacatgaaagctgtatctttgtgtcatctctcccagttgtgagaaagacgtttctgattaaattgtttggcataaaattttgtaaaattttactcttttggtgtgaaaatcaaactgctctattactagaaaagtttaccttttgataagtataattttactctattctatttaaattcttcagaaaatcctgacatagaatgcacttaaatttttttgaaaattaaaagtgcttaaacattttttatacaaactaaaaataattttagattcttagaaaacatctttcaaatactttaagttaccttcctctgacagtactttttttatattgctataacacagcttttctgtcctttgtggccaactctgtcacttctatcctatttagttgtgcagtatttatgttttgcattttacatttttttaaggttatagattaacagcatcccaaggcagaagaatttttcttagtacagaacaaaatggaatctcccatgtctacttctttctacacagacacagtaacaatctgatctctctttcttttccccacatttcccccttttctatttgacaaaaccaccatcgtcatcatggcccattcccaatgagctgtcgggtacacctcccagacggggtggcggccgggcagaggggctcctcacttcccagatgaggtggctgggcagaggcgccccccacctcccagacggggcagctggccgggtggaggcaccccccacctccctccgggacggggtggctggctgggcgggggctgccccccacctccctcccggacggggcggctggccgggcgggggctgcccccacctcctggatggggcggctggccggacgggggctgccccccacctcccggacagggcagctgccgggcggaggggctcctcactttccagacagggcggctgctgggcggaggggctcctcactttccagacagggcggctgctgggcggaggggctccttacttcccagatcgggcggctgccaggcggaggggctcctcacttctcagacggggcggccgggcagagacgctcctcacctcccagactgggtggcggtcaggcagagacattcctcagttcccagacggggtcgcggccgggcagaggcgctcctcacatcccagacgaggcgacgggtcagaggcgctccccacatctcagatgatgggcggccgggcagagaggctcctcacttcccagatgggatggcggccaggaagaggcgctcctcacttcccagactgggcagccgggcagagacgctcctcacttcccagacggggtggcggccgggcagaggctacaatctcagcactttgggaggccaaggcaggcggctgggaggtggaggttgtagccagctgagatcacgccactgcactccagcctgggcaccattgagcactgagtgagcaagactccgtctgcaatcccggcacctcaggaggccgaggcaggcggatcactcgcggtcaggagctggagaccagcccggccaacacggcaaaacccagtctccaccaaaaaatgcaaaaaccagtcaggcgtggcggcgcgcgcctgcaatcccaggcagtctgcaggctgaggcaggagaaatcaggcagggaggttgcagtgagcggagatggcggcagcacagtccagcctcggctttcacaactttggtggcatcagagggagaccgtggagagggagagggagaggacattttacattttaaaagttgtaattcatgcaatgtaattttcaaacagttgaccaaccttttttcatgtgaaactctgcttaatcagcagtcactttatttttactcttcaagggcattttcattccctgaaaagcagagcgaaagttcaagtgagtgtgctgagctggtcctcgccagtgtcagtttattcacattcacacaggtgaccttctggggaaagagggttcatttcaacagccttattacaggaatgtggaacagatttaatagagtaaaatgtaaatcactgactttcaagaaaaaaagaaatttttttttattctttgtatgtgagtatgtggtggttgtaaagtttacaataaagactaaagttagagagcacactttacatgaggggtacagtgcaggtcctatgcaaccttctttttgccaaacatgcccttaatgcttttttcaagtagtatgttgctgtatccatcacttatcaggctctgatgatcattttctaatttatcaatttaaatatgcagtcaatatcatccagagttctgtccttgacgtttaactgctcagacataaaactatttaaatattcttgataaaagatgaggttttatttattttactacagagcatttcatgccagtaagcttaagtttcatgaaacttgaaaacatgctttagttttaccttcgtttggaaagccaaatttggccaaaaatgaatacaacaataaacttgaatataaatcattttgaaattgaattcaaattattaaaatattaaaattgataaatgtatttgactatgtgtcaaattattaaaaatttttgaataaaaagtgtaataaagttggaacttgagaaatatgcatgcttttatgataaatcattttgtgattaaagtttcaatttagcagttttgactgttgaaaatgtgaatactgacatatcagagaagaaaatattgataacaaagaatacaaaacaaagcacaatagtgttgatagctgtggtgagtcctcagctcttgtcttagtttcaaaaaatttaaacaagacaaaccacaaagaagatgcagcataatttattgcaaaggagaaagactattttaaaagttagatgcagaatacccagtacacgctgagcgagaagggattcagggcgggcagcttacaggaatgagacgaaaagactagaactaggaacactccatttatgggaatcttacataattattcataaggaggtggaaagaggtgttaactggtaagcatgttctgggtggtcctcttggtgcacatacacagtggctgtacatgcttgtttatatgtcacgtgttattagcatcttaaatctcaaccacggtgtgttttttactatttataatagtaataatgagtaaaaggtcactttaaggacaggtaaaatcaaaatgtgcatgctctctacaagggtatttccctacatgagagagctttgcttgaatgagttgaaatacgatgcaaatgctggggcttactgggttgacaatatgcagttgccatgcattcaccgtggttgctgcatcccgaggacattatcagtatgccaacgtggtatactgtagtagtcactttcttgaatacccatcctgcctcaatagtacttgtactgatttattcccaacgactgactccgagacttaagatttagctattatatcaacattgtcaacagtaggaaaatcaaaattttaaaatcaaatgtatttgagtttgatttgggtaattagctgagtgcccaggaaaaattattttacatttctgaagcttcaatcttcattattaataaaaaatattatctccctcagggctgttttaacacatggtagctataagtatttttaactgaaagtcttgtgtaaatattatagtaaatatttaagaataaatattcatatttcaaagattatgtgagttggtatattttgtcatgtttaatgtatttatcctttccagaaaatgccacagtaagaattttttattttctctggaataaaagactaaggttttctacattgtgactgtgctgatatttgcatagggttttgactgttactgttgaatttaggttgaatttcaaatccactgttgtttagcttgtgtggtttctggttcatttggagaaccaaatatattagacgtgaactgtttggagtaacttggcatcatttcagctgtccttctgttattacatctggggctttagaaatgactaggattcaaataaggttggtttggaatcaagcaatagaaaatccccccaaatactcagggaaatagctactgaataatgcctttcagtgagatttatacatgaaacagagttcaatgaaattcaaaaattattgcaagttttctaaatttagaaactgactgcaaacaacatattaggcacttgtagcttgtctatagcatctgtagcctggggaagctgacattacagaaaagcatattgctactgtaataagatttggaacaaaaacttacgtgcatgtaaacattcccccttagtaatccttaaatacttgtcattctggctcaatctttttggtgcaactgtttatgatttcagagattctatctcaccaatttcaagctatggtgttttcagctcttaatgtttacttgtacccagtaagcttcatggttacatcattatattggggtcccccaggcaatccctgaggcttagagctgaccatcctacctcatcttttttgcttcacatgctgttattgagtccctttcactccatatttgagccttaatgagccttccatttaaggaaaccagaagaatgggttgcccatatatgttgagttgagaatcaggattctcttgagtataaagactttacggccgggcacggtggctcacacctgtaatcccagcactttgggagaccgaggcgggtggatcaggaggtcaggagtttgacaccagcctgaccaatatggtgaaaccctgtctctactaaaaatactaaaattagccaggtgtggtggtgcgcgcctgtagttccagctgcttgggagactgaggcaggggaatcgcttgaacctgggaggcggagatttcagtgagccaagattgccaccactgcactccagcctgggcaacggagcaagattccgtcaataagtaaataaaataaatagactttacatttattcatagtacaaagcagtatttttttttttttaatatggagtctcactctgtcgcacaggctggagtgcagtgtcatgatcttggctcactgcaacctccgcctcctgggttcaagcgattctcctgactcagcctcccgagtagcgtggactacaggcgcatgccaccacgcctgactaatttttgcatttttattagagacgggtttcactatgttggccaggctggtcttgaactcctgacctcgtgatctgccggcctcagcctcccaaagtgctgggattacaggcgtgagccaccacacccggccacaaagcagtgtttttaagatgtgaacatgttttactcaaattaaatataaatgattttatcagtattccaatgtggtgaaaataactgcatgaagttcaccaaatgttctgcttcagactttttcgaaacaaagatcaatatgtatgcactagtggatattagttatttggtgttggttttcatttttaaagattttttccctactttatgctgatgttaagctacacaaagcataccaaaagctataatttaccacactttttaccaaaatttcaaatacttaaatattgaaagtgatattcttgattaccattttttatgtgatgtagtctgcatttattagtactacattgcatttttttatgtggtgccaggttataaaaatgccttccagctgatttcttaggtaacagtagaatctgttttcttagacagtaacatgagaattctttgtatactacctttggaggtactaaaagcagctggttaaaggtactgaaatctgtccttattaatggaaatttaattcaaagactatgcaaagaaaagtcattcaggcaccctgaaactaaattggaatctggttcctgacactgattaacagattgagcagattagagtggacctacgtccctttaaacaatattgaaacacatttttttttgagacagcgtctcgctctgtcacccaggctggagtgcagtggtgcagtctcagctcactgcaacctccacctcctgagttcaagcaattctcattcctcagactcctgagtagctgggattataggtgcctgccaccatggccagctaatttttgtatttttagtagagacagggtttcaccatgttggccaggctggtctctaactcctgacctcaagtgatctgcctgcctcggcctcccaaagtgctgggatcacaggcgtgagccaccgcgcccagccagatttgattttttaaatgtttgtgaatgtgtatcactgtagtgaaaaatcaaattatttaaatctactttctaaataattttgattaaagtattctgtattttgagtgccagtattcatatagtatgccaaatcacccatttgtttactattttgccattttataaaataagcctgaatttgtggagacatttttaaagaaaccgatcttttctacaaaaagatttagacatcgaaaatagagaatttagtttcacattatatatatagtttgctgaaccctacagtaatttgtaaagtttgtttgtgtatgccaatcttagattttctaaaacaaaatgaagggtttttgttttatgttacatttaatatacaaagtccaaaatatgctcagacagacaacttcatcagactccttcatcaactccgtttccatcgtggcgtgaacggtttctcactgctttagcatctgcctttgatttctactaattttctttgactttgatttttcttgtccatctctggtggttgctttgctgctccactttgaggagttcgggcagcttcaccctcagccgctccaacagtccgtccatttggctcaagctctaggcagtttctcctggttcttctgttcctggcgtctgagatttgtcagcagggccagattttcaggaaccatgcatggctatcgcctcctcccgcctggagggctgctcctgcgcctctgaccggcgctggttccagccgcggcccagctgagcacagcaggaaccgcagtagcagccggagcgcccacgcccggggtcgcctagcccaggaacgccttagttgcaaccctgcgtcgaggcccagctccgtgcgcagaaagccgaggccaaccagagcatttcctggacgagtcctctcggcctgcggggccagttcctcctaccagcttcctgctgccacctcggcttccatcagagggacgcttaggatggcgcaggggcccggagacactgtgaagagtccaggggaatgaggaggggctgggccgggcagcctcaggcccagcgcaggttagcgcttctcacgcctgagcagagatcagctactgccactgcggggaggacagaaggacccaggctccccagcctccctctgcaccgggagtgtaggaaactatttaaaaataataataataataataataataagtatggaatagaacttgcagatctaacccaaccaagttttcattctttttccttttccttttcttttttttaatgtatttttctcttatattatgctcgcctgacggaagattttatgttccatcctcacatggaaatttaaatgtaatcataatggtcacaaatttagaaacagtatttactttattttgcctaagaatgctggggtaacattaatttttcaatggtgccttctgaatcttaacgttgattaccttttatttgagtctattaactaaactgtagtaagtaataataataaattcttgatttgcatagggcttaacagtttacaaagggcatgtattcattcgtttaaccgataaatgtgcgttgagctacacgttgtgctatattttttgctagccttgggagataaaattaataaaagaaagtattggccgggtgctgtggctcacgcctgtaatcccagcactttgggaggccgaggcgggcggatcacgaggtcagaagttcgagaccagcctggccaacatagtgaaaccccgtctctactaaaaatacagaaattagccgggcatggtggcacgcgcctgtagtcctggctactcaggaggctgagtaaggagaatcacttgaacttgggaggcggaggttgtggtggtgagccaagatctcaccactgcactccagcctgggcaacagagcgagactcaaaaaaacaacaacaaaaaaagaaagtgttgatctcttctctcaggaaactttcagtctggcttcataaaatcctcacacactctcataaagtctcttaagtcttctataagcctgctaccccaaagtgaccactatctgaattttgtgttattcactttatgcaattttatgaacaatatacattttagtgttgcctgtttcttttttttgtatatatatgctagcattagttttcatgtgtgccttttttaatttatatgtatattttcctatttttccatgttgctttgcatagcaacagtgattttatgtacctttggaagcagtattgtatgtatgtttcctgggttagaccagtgtcttcaacggttagaagagcaggctcagacagcctgtgtaacgttgggcaagtatcttaacctctctgattcctctgttacttagagataataacatggcagtgaaatccgtgttgttctttgaatgtaataataaagtaggtaaagttatattaagaacaataaaaacattacaaaagacaaaagagtatttatagatacattcaagacttaaacataagataatattttaaacaattttatgttattaaatttgaaaatttagataaaactacctttttttttccagaaaactatgtgacaaaaactgattaaggaagaaataaaaaagataaatagaaaaattggccgggcacagtggctcacacctgtaatcccagcactttgggaggccaagggaggtggatcacgaggtcaagagatcgagaccatcctggccaacatggtgaaaccctgtctctactaaaaaaaataaaaataaaaaaataaaaatttaaaaaaattagccgggttggtggcgggcgcctgtagtcccagctactcaggaggctgaggcaggaaaatcacttgaacctgggaggtggaggttgcagtgagccaagattgcgccactgcactccagcctggtgacagagcgagactccgtctcaaaaaaaaaaaaaagaaaaaatgttgtttttaattttacacacctaaaaagtacatgtattataaaagaacagcttgataaatgtttacaaaagatatataccatgaacccagcacccagcagtggaagagtatgaacaacctggacactccccctcctttattctcctttttttttcttttcttttctttttttttttgagaagaattctcgctctgttgccccaggctggagtgcagtggtgtgatcttggctcactgcgacctctgcctcctaggctcaagccattctgccttagcctcctgagtagctgggattacaggtgcacaccacaacacctggctagtttttgtatttttagtagagacggggtttcaccatgttggtcaggctggtctcgaactcctgacctcatgatctgcccgcctcagcctcccaaagtggtgggattacaggcgtgagccaccgcacccagctattctccttttcaatcactgttctgccaacagaaacttatatcctggctttttatacaataaataatatttgtctgtttttgaactttaaataaatagattaatacaataagttctcatttttggccagcttcttttgttcaacattgtgagattaatctctgttgctgtctgtggtttgcatatttattgatctaccatgtgacatcatataaatacactacaatttatttattcaactgttcatgaacattttgttaaatttccagatttttcagtgcgtctatagaccatcttgtgctttttttttttttttttttgaggtgtcgcccaggctggggtgcagtggcacgatctcggctcactccaacctccgcctcccgggttcaagcaattctcctgcctcagcctcccgagtagctgggattacaggcatgcgccaccacgcccggctaattttgtatttttagtagagaaggggtttctccatattggtcaggctggtctcgacctcccgatctcaggtgatctgccacctcggcctcccaaagtgctggcattacaagcatgacccaccgcgcccgcttgtgtgcatttttaaagataaatttctgcaattatgtagatattttaccacaaatataattaaaatatatttatatcttcagcttgtgtaggcattggcaagccctcttccagaatgtagtaccaacttatactaccagcactacaggatggattatatattatctaattgtctttattttctaaaccctacagtgtaaactttgtgaagtcaaaggcctttaatttcattcaccataatatttgcaatttttaattaaatgaattttatttgactttgaagcattttcttttttttttcttttttttttttttgagacagagtctcgctctgtcacccaggctggagtgcagtggcgtgatctcggctcactgcaacctctgcctccctggttcaagcaattctcctgcctcagcctcccgagtagctgggattacaggcgcccgccaccatgcttggctaattttttgtatatttagtctggtctcaaattcctgacctggtgatctgctgcctcggcctccgaaagtgctgagattacaggcatgagctaccacgcctagcctgaagcatttgttttcttaaaaataactggggtagatcgggctcggtggctcatgcctgtaatcccagcactttgggaggctgaggcaggtggatcacctgaggtcaggagttcgagaccagcctgaccaacatggtctctactaaaaatacagcattagctgggtgtggtggtgcatgcctgtaatcccagctacttgggagactgagacaggagaattgcttgaacccaggaggcagaggttgcagtgagccgagattgcgccgttgcactccagcctgggcaacaagagtgaaattctgtctcaaataaataaataaataataaaaaatgactggggtaaaattgatttatttatgcttttctgaacatttttttccacatctctgtctctttacacataagatttatctgccaaaattttttttcttattttgaccattctcagtgagggtcattccaccccaggagatactgtaaccaagcaggtgcaattgaaggcaggccttggctgaccaggtgagctctaagcaattgtaaataactaccttccaaatatgtataatttatattttttatttatataccataaacgtttattaagctgtaatatttacaatattattttctgttctgagatctacaactatatctacataacaccaatgacaatattttaataaacaggaggaatatatatatatagctttacaaaaaaagcctgatacatttgcatcgtataagatactgtagaatcaatttccaaagctcaaagaactaaaacacacacacacagacacacacacacaaacatcctaatacaagagtcaacatttctcctctttcctgggtccaggtatgagagtcatcactgtgtctgtgagctgagaccagaaataagacacccacctgtggcaacatccacatataaaagtcacaatacaaactgtgagctatatccacaagtgagactcagaacctcagcagtgggctccgtccatgtgtgagggtgataatcctgtcagctgggtgtgcatagaagagtcacaatctcaactttgtactgggacctaatatgaaacccttggtgaaatgtaagggctttatattatatacatgagtgtggtaatcttctgagaactttctgcaagtagaagactcaggaccttacccattgccctaagcccagctacaagaatcaacacctcttctattggctaaatccaagtatgagagtcatcattgcacctgtgagcttgatccagaaatgagtcatcatctcacacattgctaaatttacataggacagtcacaactctaactgtggaccatgtccacatgtgagattcaggacctcaccagtggattctgtccatgtgtgagagtgacaattctaattgtccactgggcgtgcctatgggatgcacaatctcacctgtgtgctgagtcctgttaggacactctgtgtcactcaaggatgttataggatatgcatgagtgtcatcatcttctgtgacattaccacaaataggaaacagaagaccttacctattcccctaattctagccatgagagtcaaaatcttttctgttggttgggtccacatatgacagtcatcatcacacctgtgagctaggcctaggtatgtcacaatcccacctgtgggaagaccagacaggagagtcacattgcttgaatgttggtctaggaatatttcaataaccccatgtgttcagggccctggcaagaaagtcacattacttgagtgctgagctcagcaatatgtcaaaatgcctctgtgggcagggcttagcctagagaaccacatcacctgggttctgtgtaaagcaatatttcacaattaactctgtttacatggctcaggaaggaaaggaaagtcatgtaggttctggcctactggataggtcacaatccctcctttgacagaactcaggcagcagagtcacatcatttgtgtgtagggcccagtatatgtcaaaatcctcactgcagtcaggggccatgatggaagaaagagtcatgtcacctaggttctgggcaaggaatatgtcacaatccacctgtggactcagctctggccccagagtcacatctcctgagcactaaattcaggaatatgtcacagtgccctttgtggtacaggccagagcagatgtatcacatcacctaggtgctatgcccagcaatatgtcactatttattttgtgggcaaggcccaagcaaaagaagaattacatcatctaggtgatgagccccatgatatatcacagtgccccctttgtgtagggtccaagcagaagtgaaaagtctcatcattgtgtcttgggcctaggaatacatcacaatggcttgtgtaagcagtgcttaggcagaagagtcccattacctaggtgctgggcccagagatatgtggaaatcttcctgtgggcagagcacaagcaggtgaggaaggtcacatcagctaggtggtaggcccagagatatgtcacaatttcccctttagggcaggccaatgcagaagagtcacatcacctgggagatagtccccacattatgtcaccttgccccttgtagacagggccctggtgggagctgaaaatcgcatgacctaagggctagtcttagcgatatcttacaattctcttttaggacagagtacagacaggagaggagagtcacatcacctaagtactgagcccagtgacatgtcaccattctcttttatggcagggaccaggagcgtcacatcaccaaggtgttgggttcagtgatatgtcaaaatctcccctatggacaggggccaggcaggagaaaacactgatatggtttggctgtgtccccacccaaatctcaccttaaattttagcaatcccttcatgttaagagcaaggacaggtaaatataattgaattatggaggtggttttatactgttcttggggtagtgaataagtctcgtgggatctaatggttttataaaagggagttcccatgcacaggcctttatgcctgccaccatgtaagatgcctttttgctcttcctttatcttttaccatgactgtgggcctcctcagccatgtggaactgtgagtccattaaacctatttcttctataaattacccagtcttgaggatgactttattcgcagtatgagaacagactaatgtagaaagtcacaattttagttgatgggcccacacatatatcacaatgccctctgtgggcagggcccatgcagcagagtcaaaccacttgagtgctgggcccagcattttgtaacaatcacagctgtgggtggcacatattcagaagaggatagccacttcacccaggtgatggggccagagatatgtcacgatgccccttttgggcaaagcccaggtagtagaggagagtcacctcacctaggtctggggcccagtgatattttctatttttttgtatgtaaggcacaggaaaaagtcacatcacataggttctgggttcagtgatatgtcacaattcttcctatgggcaacacagaggcagaagagtcacctcacgtacatgctggatacagtaatatatcaattttccctgaaaacagggctctggcaggtaaaaagaatcccattacttgggtgatgagcagaaagatgtgtcacaatgccttttgtaggcgggcaaggccaggcaggagactaacatcacctgggtcctgggctcagcaacatgtcacaatctccccttgggcattgcccaggcatgaaaagagagttacatcatctaggtgatacatccaaatacatgtcacacacacaaaaaaacagggcctagaaaaaaatagagacagattacctaggtgctggatccagagacatgttacattcccttctgtgagccagaaccaggcaggagaggagagtcacatcacctagatgatgggtgcagaggtatgtcacagtgttctccataggcgaagcccagataggagagttaaatcatctgggttcaaggcttatgagtagggctcactcaggagaaaagagtcacatcatttagctgttgaacatggtaacatgtcacaatacccactgtgggtgggtcaataaagggaagaagcattacatcacctaggtgatgagcccagtgacatctcacatttcccactgttgggagggcccaaacaggagagagtcacattacctaggtgctgggcccagcgatatgcaactctcccccgctgagcagattccaggcaggagaggaaagtgacatcatctgcttgctgggctcagcaatatgttaccattcatcctgtggatggggtccaggtagtagaggtgaaaaaaatcacctaggttctggattcagtgatatgtcataatacccccgagggaatgacccagggatgagaggggagtcccttaatctagttaatgttcccagggatatgtcacaatgtccctgtaggaacagggaggaatgtcacaatgtcccatattccagggaggaatgtcctggaggaagaaatctaaatgctgggcttagcaatatgtcacaatcttttctgtttgcagatcccaggcaaaagaagaaagtcacagcatttaggtgtttggcccaggtatatgtcacaattccagttttggcctgggccaaggcaggaaagtcaaattactaaggagctgggcaaaggcatatgtcataatcacatttgtgggaaggtacagggatgagattgacaaccctgtatatgtcccagctctaggtatgagattcaacatctgtgtgttgggtcctcgtacatgagtcacaaactcaatggtggactgggcatgtgcatgagacctcaatctcaccagcagactatatcccagtagggaactcacagcctcacaggggtgctaaatccaggtcagagagtcattatctcacttgtggactggattcttgtctgagacacaattccaaattttgactgcctccagctatgagatttaggacttcaacagtgtgctgtattcaagtgggagggtgacaattcttacatcacctgggtgtacatacaagagtcacaatctcatcagtgtgctgggccctattatgacacactgtacaacttgagggctttaaaatatacacctgagagccacaatctgctctgagaccttcatgcttgtatggatctgtgatcttactcattgccctagaatcaggtatgagattgaacatctcttattggctggatccaggtatgagagttaccaccattcctgtgatctgagtccataaatgagtcaccattggaactgtggccatattcacatatgataatcacaattccaactgtggactgtgtttgcaattcaggcttagaattttaccaacaggctctgtccatgtgagagagtgacagttataactgtggcctgggtgtgcatatgagagtcacaatctctactgtatgctgagtcctgttatgatactctctgtaccactcaagtgctttatatagtatgagtgagtgatgtgatcctttgtgatctttatacaatttagaaactaaggaacttactggttgccctaatcttagctatgaaaattaccatctctcctattagctgagtccaggtacaagagtcatcctcatccctgttagctgggagcagggataaggctggatcatcacatcccgtgggtgctggaccagggctcggcaaatgtatacataaaaatcacacctgcaagaaggtccagtggttagatttacaattctgcacgtgtcccagctttaggtatgagagtcaacacctcctgtgagttacgcacaagtacaggactcatcatctcaatagtaaattggatccatgcatgagagtcccagccccacctaggggctgtgttctggtgtgagagtaacaggcccatgggtgtgctgaattctggtccaagcatcaccaccccacctgtggatgggatccatgtatgaaagtcatgattttaactgtcaactgtctctggatgtcagattcagaacctcaaaggtgagctgtgtccatgtgggagagtggcaactcttatttttgggtgagtgtgcatttaaggatcacaatcttccctgtgtgattggcaccgttatgacattttctgtatcacccaaaggctttatatgatatgcatgagagtcacagtctgctctgagagttttgtgctagtatgacccatgattttacctgttgccctaagcccaggtatgagagtcaacctctcactaatttgctgtatccaggaatgacagtcatcactgtgcctgtcagctggattcagaagtgagtcaccatcccacccgtggctggatccacgtataagtcacaattttaactgcaaactgcatttacatgtgagatttgagatcttaacatgtgtaagttaaaatcctaactgtcggctgggtgtgcatgtgagaatcacagtctcacctatgtgctgagccctgttatgacactctttgcaccaactgaaagccttatacaatatgcatgagtattgtaattttctctgaccgtcgtacaagaaacacacccaaaccttactcactgcttgaagcctagcaaagagaatcaatatctctcctatttgctgggttcaggtatgattgtcatcattgcaccagtgagctgagcccagatgtatgtcacaatcccgcccgtagacagggaccaggcagaagagtcacatcacctggatgctaggacaggaatatgtcaatcctcattatgagcaggatgagggaagaagagtcattgctgggttctgggcctagtgatatgccacagcccttcatgtgggcaggtcccaagcagacgagaacaataacattacttaggtgatgagcccagcaatatgtaacaatgcccaatatgagcagggcccagggaagagaggagagtcacatcacctagttgctggttcccataatatgttgcaattcccactgttcacaggacttagcaaaagaagtgagtcacaaaatttaggtgctgggctgggtgtggtggctcatgcctgtaatcccagcactttgggaggccaaggcaggcaggtcacctgaggtcgggagctcgagaccagcctgaccaacatggagaaaccctgtctctactaaaaaaaaaaatccaaacatagccaggcgtggtggcacatggctgtaatttcagctactcaggaggctgaggcaggagaatcccttgaacctgggaggcggaggttggagtgagccgagattgcgccattgcatgctagcctgggcaacaagagtgaaactctgtctcaaaaaaaaaaaaaaaaattaggtgctgggttaagcaatagttcaaatagttcacaatccccactgttggcaaagatcaggcagcagagaagactcaaatcacctagatgcttggtgcagcaatatgttacatgttcttctgaagctgagacccagacaggagagaagagtatcttcacctaggtgtttgactaagaaatatgtcataatgtcccatgtggggagaaataagtcagaacaagcacatcacctaggtgctgggcccagtggtatgtcacaatcttctctgtgatcaaagccttggcacaaggggagagtcacattacctaggtgttgaattcagaaatatgtaacaatcacttctaagtaatgggttcaggcagatgaggagagtcatgttaccttggtccttggccttgatatatgtcacaatttcatttgtgggctgagcccacaaagaaaactaaaatcactcagggtatgggcaaaagcatacatcacaatcacacctgcagaaaagtccagggatgagatacacaatcccaaacatgtccagctccagggaggacagtcaacacctcctgtgtgttcagtccgagtatgcaagtcagaatctagatattggactggatttgtgcctgagagtctcaaatcaaccttcagattgtgtcctggtagtagagtcacagcctcagaggtgtgataaatcttggtctggagtcattatctcatctgtggacctgatctatgtatgagactcacaattccaacttttagctacctcttgagtgtgagattcatgacctcaacagtgggctgtagctatttaagagggtgaaaattcttactgtgaactggacgtgcatatgagggtcactatctcacctgtgcactgggccctgttaccacactcttggtgccactcgagggctgtctatggtatgcctcaaagtcacaatccacaattagatctacatgctggtatgaactcatgatcttacccattgtcctaagcccaggaatgagagctaacatctctcttattggctagggtcagatgtgagagttctcactgtgcctgtgagttgggtgcagaaagaagtcatcatcccacctgtggccagatccatgtatgacaatcaaaatttcttttttttttcttttttttttttgagatggagtctcgccctgttgcccaggctggagcacagtggcatgatctcagctcaccacaacctccccctgctgggttcaagtgattctcctgcctcagcctcccgagtagctgggactacaggtgcgtgccaccatgcccagccaatttttgtatttttagtagagatggggtttcactgtgttggccaggctggtctcgaactcctgaccttgtgatccacccgcctcagcctcccaaagtgctgggccactgtgcccggatgacagttacaatttcaactgtggacggcatccacatgtgatactcaggacctcaccgtggtctctgtccatgtgtgggagtgacaatcctcactgtttgctgggtatgcctatgagaatcacagttttaactttatgctggaatctgttatgacactctctgtatcatcagaagggatcatacaatatgcatgagttttgtaatcttctgtgaccttcatacaagtagaaagtccaggaccttgcccattgcttgaaggctacctatgagcgtcaacatatctcctcttggctagatccaggtatgcagctaatcactgtgcctctgagctgggtccagaaatcagtcactgttcaacttgtttccaggtgtacacatgacagtcagacttttcactgtggactgcatctgcgtgtgaggttcagaagctcaccagtgtgcttctttcatgtttggaagtgacaatcccaattgttggcttggtatgcctgtgagagtcacagtctcacctgtgtgctgagtcctattattacattctctgtagcacatgaagtatttataagatatgcataaattttatacatctctgtgacccttctaaagtaggaaacccaggactttacctattgcctaaagtctaactaagagcgtcaaaatcattcctattgtctgggttctcatatgagtgtaatcgtaatgcctgtgagctggaaaaactatatgtcaaaacttagcctgtgtgaataaaccagaaaagagaatcatgtcacctgaacactggactaaaaacatgtcgctatccactctgtggggagggccatggcagagaagtcccataacctgggtactggtcccagcagtatgttgcaatgccttctgtgggcaaggttcatgcaggaaagacacattatctgcatgcagggcacagcaatatgtcaccctgtgtacagggctcaggtaagagaggagagtcacaatatccagttgttgggcctattgataggtcacaatgcctccttttggaggagccaaggcaggagagtcatatcatttatgcatagggctcagtgatatatcacaacccacactgcggcaaagcccatgcaaaagagtaaagtcatatcacttaggtgattggcccagttatatgctacaactatctgtgttggcagggcccaagcaggagaggacaattacataacctgggttatgggcccaaagatatgtcacaatttcccctgaggacaaggcctatgtaggaaaggaaaataacttaaatgcttggctcaggtatacatcacaattttatttttgggctttacccaggcaggagagtcaaatcactcaggtgctgggcaaatgtatatatcacaatcacactagcaagaaggtcgagaaatgagattcaaaattccacacattttctgacttcaggtatgagagccaagagacctcatttgagttgggtccaagtacataagtcacaatcttaatggtggactcaatccctgcaagagagccccaattccaaatgcaactatttctgaatctaagagtcacagcctcacaggtgttctgaatcctagtctttgagtcaccattctacctgttaagcagatccaagtatgagagtcataattccaactttcaactgcctccatgtgtgagatccacagcctcaacagtggacggtttccatgtgtgacagtgccaatgtttactgttggctgagtgtgcataggagagtcacaatttcacctgtgttcttggttgtgttatgatactatctgtattacccatgggctttttatggtataagtggcagttgaaatctgctttgagaccttcatgctggtatgaaccaatgattgtacccattgccctatgcccaggtatgagagtcacatctctcttgttggccagatataggtatgacagtcatcaaagtgtctgtaagctggctccaaaaataggtcagcataccaactgtcccaggacccacatatgactgtcacacatctaattttggagtttgcccatgagattcaggacctcaccagtgggctcttcttatgtgtgagggtgacaatcctaactgtcagctgggcatgcctatgagagtaacaatctcacttgtgtagtggatcctgttattatactctcaatattacacagaagctttataggataagcttgagtgtcataatcttttgtgatctttcctcacataagagacacattactttatccattgcgctaagcctaaaataaaaaggcaaaaaacacccttattggcgggtccgtatatcaaattagccagtaaaaaagatactctctgtcctagccaggctgagagaaacaggtcttctgggtcttctctttgtacaaagatcataaaaaattaccacttccttccaaattgtataaagaccttgggtgatgcggagagtgtaaaatgcaggtgatacagagagtgtatccagcacacaatagaaatttttcttattttatgtacacccagccaaccattagccttgtcaccctcacacataaacagagcccactggtaaggtcctgaatctaactcgtggatgcagttcacagttgaaattgggactgcatatgtgaacacctggctacagttggaatagtgactcatttctaaacccagctcataggcagatgaagaccctcgtatctaaactcagccattcttaaagatgttcactctcatatctgggcttagaatcacaggtaaaattgtaggttcacacaagcacaaaagtttcagaatggattgcaactctcatgcatactgcataatgccctcagtaagacagagagggtccttacagggccgggcacacaaatgagattgtgacactcatatgcacacccagccaacggtaaaaactgtcatccaaccacatgaatgcagccagtgttaaagtcctgaatctcagccgggtgcggtggctcactcctgtaatcccagcactttgggaggccgaggtgggcggatcatgaggtcaggagattgaaaccatcctggctaacacggcgaaaccccgtctctactaaaaatacaaaaaattagccgggtgtggtggcgggctcctgtagtcccagctactcgggaggctgaggcaggagaatggcatgaacctgggaggcggagcttgcagtgagccaagatcatgccactgcactccagcctgggcaacggactgaggctccgtctccaaaaaaaaaaaaaaaaaaaagtcctgaatctcatgccaggaggcagtcgaaagttggaaaactgattctcatatgtggagagtcagcaacccacctgaccaagattcatcatacctgtgaggctgtgaccctttgaaaataatacagtgcatgggagggattgtggctgtcatgcaaggatcctgtccgctgttgagattgtaactcttgtactgagacccaacatacagaatgtattgactcttatacctagaactgggccatgtgcatgattgttaattttatccctggacttttctgcaggtgtgatcgtgacatatttctttgcccagtacctgagtgatttgactctcttgcctgggccctctccttatagggtgttgtgacatatttccgaacccaggactaagtgatttgactttcttctgccacttgggctctgaccaagaagggattgtgatgtattactggacccagaaccaaggtgatgtgactcttctcttacatcagggcactgccaaaaaaaaattgtgacatatcacaggaccctgattctagatgatgtaactctcctctttttgctttgccccacatattttggataccatgacacatcgctaggcccagaacctaggggatgtgaggctcctgcctaagcccaccctgcagcgagccttgtgacatatgtctgcatccatgacctaagaattgtgactctttctgcctgaactttgccaacaaggaaaattgtgacatatttctgcacctaccaaccagctgatgtgtctctcctgcctgggattttcccagagagagcattgtgacatattgctgggtccagcagccaggtgaggtggttctgttcctgttgcattgttttcaggagaagatttttaaatattcttggctaagcatgctaatgatgtgactctccagcctggtccctgttttcagaaaagactgtgacgtatccatggcctagtgcctaggtgatgtggctctcctgttcgctccctaccaagaggtggcattgtgacatatatcttggttcagctcacagatgcaataatgactatcataccttgtgagttgaaccaggcaatagaagagatactgactctcacatttaggcttagaaaaatgagtaagaccctgtgtctcctctttgtatgaaggttatagaaagttaccactcacatatcacataaagcatttgggtactacaatgtcatcacaaatcccagaacatgagtgagactgtgttctcgtgtgcacagtccaccaaccattagaatttccaccctctcacattgacagagactacaggtgatgttttgaatcacacacaaatgcagtcagtccacagtttaaactgtgacttttatatctgaacatcaaggcacaattggaatggttattcatttttaaacccagcttataggcaggtgaagactctcctatccggacacagtcaataagaaagatgttgactctcacgcctgggcttagggccataggtacgatcaaaggtctcttctaacatgaagatttcagagcaaattttgactctcatgcatattgtataaagccctcgagtggtacagagagtgttctaacagggtccagcacgcaagtgcaattgtaactctcatctgcacacccaggcaagagtaaagattgtcattgccccacatgaacacagctcactgttgaggttctgaatctcacagcctgaggtggctaaaagttgcaaacttgactctcatacatgaatctgttccacaagtgggttcatgacactcagattaagattcagcaaacccgtgaggctgtgactgtacttaaaaaacacaatccccagaaggaatagggctgtcaaacatagatcctgttggccaatgggattgtgacttgtgtacttagaatgaccatacagagattgactcatacctataactgggacatgtgtgagattgttaatctcaaccctggaccttcctgtaggtgttattgttacatatgccgcagtccagcacctgagtgatttgactctactgcctggacccagctcacatatgagattgtaacatataactgggcgctgggacattttgacaccactgggccttgcactcgggtgatgtcttctctcatgccttgacgctgcccacgggaggcattgtaatataccattgggtcctatgcccatttgatttaactctcctgcctaagtcctgcctatacagaaaattgtttcatatcctgggcctgtcaccaagtgatgtgactatcttcatttgcctgatcctagctctcaggggagaatggaacatatcactttgttcagtactgagctgatgtgacttctcttgccttctgaggttttcctcacaggggagattgtgacataaagctgggcccaacaccatggtgatgttactcttttgccttggcactgtcttcagaaggccttgtgacatattgctgttaccagcaccaaggtgaagtgtgtcttgtgtttggaccctgcccatagagtgcattgtgacatatctttgggcccatcaactatttgatttgactatccccccttaccacatctttgcccataagggatatggtgacatatatctgggcccagcaccttggaaatgcgatgctcctctcttgcctgaggtatgttcagaaaagaaagggtgatgtattgttgtttatcacctaggtgatatgacctagtacattactgagtgcaaatgtggtgtgatacttctgcctggtccttgccaataaaggtaactggaatatatctctgagagcataacttagatgatgtgagtctccttttgtttcttgagtctgtccacagtggaaattatgatatattgccaggccttgcacccagtttttgtgactctcctgcttgtgtcctttccatgtggggcattgtgacatatttctgaatccaacaccaaggtgatgttactctcttgcctggaatattgttacatctctctgcactcatcactcaggtgatttgacttcttcctcctgcctggtccctgctctcagagggcattgtgacatatcacttggctcagcacctacatcatgtgactctccactcatgcctcaaccatggcttactagggtgattgtgaaatataacttggtctatctcataggctttgtgactttcttcttcctgagccctaacacagaaagcattgggatatacctctgggcctcttgcctaggtgaggagacttttctgcctaggccctcttcttagggggtattgtgacatattgctggacccagcaactagatgatgatgatgtgattctcttctactgcttggactttgcccaagaaggaattgtgttgtatcatggagctaagaacctaggtgttgtgactctcctcttctgccggggccctgcatacattctatgttgtgacatatggctgggatcaaaacctaggtgatgcaactcttcaacctgggccctgccagcggggtattatgacatctttttgttcatcacctaggtgttgtgactctctccttctgcctgggttccgacaaaaaaggggattggggcatgtcccttgaccgagcacctaggtgatgtgactgtcttatttgcctgggccttgcatatttggggtattgagacatatggctgggccctacatcaatgggatttaaggctcctgccttggtcctgctaacagaaaactttttacatatccctgaatccatcacctaggatatgtgattctcttcttctgccggcattctgcccacaggaaacactgggacatattgctgggcccaccattgagatgatgtggcattcctgcctgggtactgcccacagggagcattgtgacacatcactgggcccaccagtgagatgatgtggcattcctgcctgggtactgcccacagggagcattgtgacacatcactgggcccagcacctaggtgatgtgagtatgcatcatgttccctgctttcaggaaggcattgtaaaatatccctgactgagcatccagggatgtggctcttctagctggtctttgtcctcagggaagagtatgatatatgccttgcccagctcccaggtgatatgactctcctgctcactctctacctataggtgggattatgacatatcttggcccagcttacaggtagtatgctgaccctctttcctcgaaccagtcaatataagagatactttcatagctagacttagtgaaatgggtaagatcctgggtctcctctttgtattaaagtcatagagaattaccactttcttgtatcttatataaagtcctccagtggtagagaggatgtcatcacagggcccaggacacaagtgagattgtgtttctcatacacacatccagccaactgttaggattgtcaccctcacatctaaacagagcctactggtgaaatgctgaatctcacatgcagacgaagtctgcagttaaaattctgactgtcatatgtgaacacctggccacagttgcgatggtgactcatttctaaacccagctcatagagaggtcaggattctcccatctagactcagccaataggagagatgttgagtctcatacgtggaattaggggcacaggtacaatcatcggtgcataacagcatgaaggtctcagagcagatgttgactctcatacataacatatgcagcccctgaatggtagagagactgtcctcacagagcccagcaaacaggtgaagttgtgacactcctttgcataggtggccaatagtaaagattgtcatccttccacgtgaacacagcccaccgttaaggttctgaatctcccacctggaggcagtggaaagttggagaattaactctcatacattgatcttgtccctaggttggttggtgaatctcagatcaagattccccacatctgtgaggctgtgactgcactaaggggaaacagtcttcagaaggagttaagtctcttttgtacagattcagtttatttttgagattgtgactcatgtacttaaaccaaacctacaactggggcatgtgtgggactgttaatcctatccctggaccttcctgtaggcgtgattctgatgtatgcccctccctgggtctaccttccaatagagattatgacatgtcattttgccccatacttagctgatgtgatctattctcctgtcttggctgtctccatagaagatattatgatgtatctacaggccctgcacccagtttacgtgatttctgcctgtggcctgcccacattggctattttgacatattgcacagtccaacacccaggtgattttactcttctgcctgggcccttcctacgggggacattaggacatatttctgtgcccattgtgtgtgtgtgtgtgtgtgtgtgtgtgtgtgtgtgtgtgtgtgtgtgtctgtgtgtgttttgagacagaatctcactctgtcactgaggctggagtgcagtggcatgatcttggctcactgcaacctccacctcacaggttcaagtgattcttgtgcctcagcctcccaagtagctgggattacaggcgcctgccatcactcctggctaagttttgtatttttagtagagatggggtttcactatgttgaccaggctggtctcaaactcctgacctctggtgatccacctgcctcggcctcccaaagttctgggattaaacgcatgagcgaccgcacccggccacatccatgtgttttgactctcttctcccgcatgatttctgttgaggggggggattgagacatatctctggtctcagcacccaactgatgtgactcatctctttttcctatgttttgctcacacaaaagatagtgacatatcgctaggccaaacaaagtggcattactctcttgatttggtcctcctctcaaaaggcatcatgacatattgatgggcccagcacgaaagtgatttaagtctcatgcctagactctgcttacaggggcattgtgacatatctctgggccaatctactatttgatgtgactctccttttgtacctgggctttgcctatagaagacattgtgacatatctctcggctctgcacccaggtgacttgacttgcctcttctgcttgggccatacctacagggaacattgatacatatctgtggccccaacatgtagatgatgtgactattttcttttttcttggacccgtccacagtgggaattgtgacatatcacttggcttagcatttgtgtagtgtgactctcctctcatacctaggccttgtccactggggtgatatatatctgggcgtagcccctaggttatttgaagctcctcttttccatgatccctacttatagcatgcattgtgaaatctctggtctactcacctcggttatatgactttcttttatttttatttttatttatttatttttgagatggagtttggctcttcttgtccaggctcaagtgcaattgtacgatcttggctaactgcaacctctgcctcccagtttcaagcgattctcctgcctcagcctcctgagtagctcggattacaggcacacgctactatgcccagctaatttttgtattttcaatatagatggggtttcaccatgttgaccaggctggtattgaactcccaacctcaggtgatctgcctacctcaacctcccaaagtgctgggatttcaggtgtgagccactgtgcctggccataactttcttttatttgcccttccatcaggggacattttgacatattgctgggcctattatctggatgatgtgactctcctcacctgcctgcaaactaccagaaagggacattgtgacatatctctaaaccaattttctacataatgtgcctcttctctgctgcccaaaacatgcataaagaaaatattctttaggcccctgtgacctatctctggacccggcacccaaatgtcatgactatccagtctgggctctgcctagaggaaatgttatgatatgtcactgggccatgaacacaagtgatgtgactctcctgcctgggccttgcccatagaggggattgagacattccaggtgaagaatcaaggtggtgttactcttatttctcagccttttcctaaggtaaaattgtgacatataacttggcccagcacacagatgagatttttactcttgtatgcaaacccagccaaaagttactattgtcactataacacatgaacaaagaccactgttgaggtcctgagtcttatatgtgaacacagccaacagttggaattgggactgtcatatgtttatcttgccagaagtgagatggtgacttactctggattcagttcacaggaatggtgatgactctcatacctgaacccagctaataagagagatgttgactctggtagctaggctttggggtctgggtcctttacttggaggaaggcaacagaagattatgacatccatgtatgttgtataaagctcttgggaaatactgagtgtcattacagggcccagtacacaggtgtgattgtgagtctcctatacatacctagccaacagtttgaattgccatgcttatacatagaccgagcctactggtgaggtcctaaatcttacacatgaacctattccaccattgaaattgtggctgtcatatgtggatccagccataggttggatgttgacaaatttctgaacccaactcacttgcacaataaacccagccaatagaagatattttgactcttgtacctaggcttagggcaacaggtaaggttttgggttttctacttgtataaatgtcacagaggattactgcactcacttatattgtataatgcccccaaggttgtaaagaaagtgtcactacataactcagcacaaagttgagattgtgaatctcaaatgcacactcagccaacagtaagaattgtcattcacacacatggacagaacccactggtgaggtcctgaattttagtcacagatgcaatccacagttgaaatttttaatgtcatgtgtgcatctagccacaggagggatggtgacacatatctgaacccaactaagaggcagagcaatgacttttatacctggaaccagccaatacgagagatgttgactctcacacctgggcatggggcaacaggtaaactcatgcgtttatacagcactaatgtctcacaggggattatgagtctcacccaaataatgtacagccctctggtggtacagagagtgtcataagaggacccagaacacagctgagtttgtgattctcatatacacttccatcccacagtaaaaattgtcatcctcccacatgaatacagacaactgttgagagtcacatcacctaggtgctggtcctagagatatgccacagtctattctgtgggcacagttcaggtaagagaagagaagaggaaagtcacattaactaggtgattggctcagagctatgtcacaatgctcctacaaggcagggtccaggcaggagactcaaatcaccttggtgctgagtccaacaatatgtcacaatctcccctgtaggcagaacctgagaaaaagagttacaagaattacatgtgggcctattgataggtcataatctttcctgtgagcagaaaccaggcagtagaaaaggttcatatcacctgcgtgattggcacatagatatgtgaaaatgctccctacaggtagaccccaggcaggaggcttacataacgtgaatgtcagccccaaaaatatgtcacaatgaacccacacgggctgggcacaggcagaagagacatataacctgagtgctaagtgcggggcctagaaacatgtgacaatgctccatgtaggcagggccaaggcagaatagaataacatcacctatgttctgggtccagtgatatatcacaatttcatctctgggctgagactcaaatcatgctgggtgctgggcacatgacatgtcagtcacacctgcaggtaggtccagggacgagattaacaatcctgcacatgtcccagttttaggtatgagagtcaacactgttgcgggaagtcagggaccccaaacggagggaccggctgaagtcatgacagtagaacgtggattgcaaatatttcatggacacttatcacttccccaatcaatacccttgtgatttcctatgcctgtctttactttaatctcttaatcctgtcagccaagaaggatgtatatcgtctcaggaccctgtaataattgcgttaactatacaaattgtacagcgtgtgtgtttgaggaatatgaaatgtgggcaccctgaaaaaagaacaggataacagcaatagttcagggaataagagagataaccttaaactctgaccgccagtgagccgggcagaacagagccatatgtctcttctttcaaaagcaaatgggagaaatatcgctgaattctttttctcagcatgggatatccctgagagagaatgcacacctaggggtaggtctctgaactggcccccccggggcgtacctgtctcttatggttgagactgcaggggtgaaataaattccagcctcccatagtgctcccaggcttattaggaagaggaaattcccacctaataaattttggtcagactggttgatctcaaaaccctgtctcctgataagatgttatcaatgacaatggtgcccgaaacttcattagcaattttaatttcgcctcggtcctgtggccctctgatctcaccctgcctccacttgccttgtgatattctattaccctgttaagtacttgatgtctgtcacccacacctatttcgcacactccctccccttttgaaaatccctaataaaaacttgctggtttttgtggcttgtggggcatcagggatcctaccaatgtgtgatgtctcccccagatgcccagctttaaaatttctctcttttgtactctgtccctttatttcttaagccagccaacgcttaggaaaatagaaaagaacctacatgattttgggggcaggtcccccgaaacaacacatcctgaatgttgggtccatctacatgaggcacatctcatcagtgaaccggatctatgcatcatagcctcaattcctattgcagattgtgttgacttaatggagtcccagcctccttggtgtgctgaatcctggtctgagagtcaccaagccacctgtggaccacaattatgcacaagagcctttttttttttttaatcttctgactgcctctgggtgtgagatttagaacttcaacagtgcactgtgttgatgtatggcttacatctttacttgaccatccttactttcagctgggttttcatatgagggtcacaatcccacctatcttctgggccctgtgaaaacattctctgtaccaactgatggcattatacattgtgcattagtgtcaccattcactccgagacattcatgctggtatggaccaatgattgtacctgtggccctaagccaagatatgacagtcaacatcactctagttggctcggtccagataggagagtcccgcctatgagtggatttagaaatgagttaccattccaagtgtggccaaatcttcacgtatgaaagtcgtaattccaagtgtaagctgcattcctgtgtgagatttaaaacttcatcagtgggctttgtcatgtatgaatgtgattaatgaaatggttggcagggtgtgtgtatgtaacacacaatttcacatgtgtgccgggctttgtgttgacactctctgtaccacccaaggtctttatatgatatgcaacaaagtggtaacccattacctttgaacaaagggaaggcccacaatattacccatattggctggttcgaggtataaaagtcatcatcacacctgtaaactaagcaaagataaatgtcacaaccctacttgtgggtagggagcaagcagaagaatcacatcatctgggtccttctccagggatatgtcacaatcatttttgagggcagggaattggcaggaaagtcacattatctgtgtgctgggctcagtgataagtcactctctattttgtgcagatggtccaggacaaagctcataggagagaagagttcccatcaaagagttgatgggtccaaagatatgtcaaattaccccttgtgggcaggatgcaggcaggagacttacatcaccttggcgctgggcccagaaatatgtcacaatgtcttgtgattgcagtgtgaaggcaagagtaacgtcaacatagtgctgggacaagggacatgttacaatctccccggtgggcagaagctagggaaaagagaaaagccacatcagctaggtgctagtctcagagataagtcacaatttttcctgtagactgagaccaggctggataagagagtcacatcacctgaataaaaggcacagagataggtcaaatgccccttgtaggaaggtcccaagcaggagagttacatcatgtgggtgatgggactcagcaatacacctcaatggcccatatgggcagggaacaggcaggagagccaaatatcctgggtgcagggcccagtgatatgtcacaatgccctctggggcatcgccaagacaagagaggagattcacagcacctggctacaaggcccagaaatatgtcacaatgtcccctgtggttagagacaaagcaaaatagttacatcaattagatactgagtccaatgatatctcacaatttacctttgagcccaggcagaaaactcaaatcactcatgtggtgggcaggggcatatgtcacactctcacctgctggaaggtctagtgatgagattaagaatttagttgccgggcacagtggctcatgcctgtaatcccagcacttttggaggccgaggcaggcagatcacctgaggtcaggagttcgagaccagcctgaccaacatgacaaaaccctgtctccactaaaaatacaaaaaattagctggtcgttgtggcagatacctataatcccagctactcaggaggctgaggcaggaggatcgcttgaacctgggaggcagaggctgcagtgagcagagatcattacactgcactccagcctgagcaagagtgagattctgtctcaaaaacaaaaaaaagaaggaaggaaggaaggaaggaaagaaaaaaagaaaaagaaagaaagaaaaagaaaaagaaagaaagaaagagagaaagaatgaaaagtatttagcatgtgtcttggttctaggtacaacacctcttgtatgttgagtctaaatacaggagtcacaatctcagtggtggactggaatcaattatttttgtggactgtgtgagcctcaatcacttttgtggactgtgtctccttagtcacagccttacaggtgtgccgagtcatggtccaaaatttgccagccctccttttgactggatccacatgtgaaagtccacactttgactgcctccagttgtgagatttagttcctcaactgtgggctgtgttcatgcggaaaggtgacatcttgactgttgggtgtgtgtgcatatgagtgtcatattctcatctgcgttctcggttttgttaggacactctgtatcacctgagggctttatacattatgtatgagagtcacaatctgctctgacatatttgtactgatatggacccatgattgtacccgtggccctaagcccaggtatgagagtcaacatctcttcaattaggagagtccagattggaaagtttttacctgcttataggctgggtttattaaagagtcactaacccaacaatggccagatgttcacatatgacagtcacaattttaactttggactgtgtctacttgtgagtttcaggacctcaaaattggaccctgtccatgtgtgagggtgacaactttaaaggttggcaggttgcgcatacaaaaaacaatctcatatttgtgctgtgtcctgcgatgacagtttgtaccacttgatggctttataccgtatgtgagggagtggtaattctctatgacatttatacaaagaaaagacccattattttacccatttccctaagcctagctattagagacagtatatcttttattaacttttttgggggggtacaaatgtcatcatcatatcagtaatctccacaaatatatatatcaacatccctcccatgtgtagggaatgaggagagttatgtcaccttggcactggcccaggaatatgtcacactcttttcggagggcaaagaccaggcaggagagtcacatcaccttgatgcttagcgaggaatatgttacaatcccctcctgaaagtagggcacaggtggcagggtaacatcacctgggtgcagggcctagtgttatatcccaatactttttgtgggcaaggcccaggcaggagaggcatgtcacctgttttttgggcccagtaataggttacagtcttccaagtagaaagaagaagagtcactactttttgctgatgaatgcaaagatatgtcacaatttccttgtaggtagggtccagacataagcctctaatctaattccactaatccacactaattccaactctggctctgccagcttcttatgacttattgtatacttttcatttctgttatgctccaggaatgagtttctcagtgacttttgaagtaatttgtccacagctttggataaacattgccctcttgaatccaagggctgttttgttgagcatatgaaggcttcccttgagtattcctctcgcttccgttcactttcttctgtagcctccatttttctaattgctttcctatagcccctttttggcagttagctgaaaaacggccttcacagctactaaaagaatatgggaagtggaaatctgagaagagaaatacttattttgttgctagaatgctcttaccgagagtcactagaggtcaatggagtcgacgacataggccggaccaaggccacaggtgcaagagacacataaagcagagatcaaaatttgggtgtacatggtaagacttgcccattccagaaccccaaggatgaagagggggccacagttcaatcccatatctcctctgttctcaagtgggtaactagtgaatcacctacaaatagtgatcagcagcttcccaacaatatctcaagagttgggcgagtggggggaagtaatgcaagacccctgaagtatgacaacatacaaaaccccaagttaaacaccgtgcacttgccttttaagtcacccacttggccctcttctaagtgtactttccttccttttgtttctgttctgtagctttctaataaacttttactgctactctaaatcttgcctgctttatgtctcctgctttatgcccctcagttgagttgtttcttctgaggaggcaagaatcgaggttcctgatgactcatacccacatgaattcacttccagtaacaggtaacaggtaggagaaaagagtaacatcacctaggtgctggtccaggaatatgtcacaataccgtattaggggaggatccaggaaaagagtcatattacctaggtgaagtgcttagagatgtgtcacaatgacccctatgggtaggactcaggaagaagagaagagttaaattacctagaagctgtgcccagctatatgtcacaatcagcccagtgggaaaagccaaggcatgaggcacatcatgtaggtgctgggtcaagtgatatgtcacaacctcctctgtggacaggtcccaggaagaaaaggagacacacatcatctagcagaaaagcccaaagtatgtaatgatgattcctatgggcaaggatcaaggcagtagaatcacatcatctgtgtgctgggcccagtcataagtcactctcttctgtaggcatagcccaggcaggagagcagagttacatcaactaagtgctggacccagagatatgtcacattctctcctatgggcaaagagcaggtataatatggtaaccacttcaaatacttgagcttccagagaccatgtcacaatggtctctatggttagggttcaagcaggagactcacgtcacgttgattgtggccccaacaatatgtcacaatgttttctgagaagagggtcaaggtaaaaaagcaatgtcactttggtattgggcccagcaatatgtcactgtctcccatgtgagcagatatcaggcaagagaagagaatcacatcaccttagttatgagcacagacatgtcacaaagccccaagtaggtagtgccaaggcaggagaatagtgtcacatcacctaggtgctgggtccagtgatatgccacaatcccatctgtcagctaggccccccacaagagtcaaatcactcaggtgctaggagaggtgtatgtcacaataacatctacaggaagatccaggggtgagattaacaattccgtacttgtcccagttttaggtataagagtcaacacctcctgaatgttgagtctaagtacatgagtcacaatctcaagagtggactgcatgaaagcctctattcctcctgtaaactttgtattcttagtaaagtcgccatttcatgggtgtgctgaaccatagtgtgggagtcaccaacctacctgtggaccagatctatgtttgcaagtcaattttccaacttttgactgccttcgggtgtaggattcagaaactccacagtgggctgtgtgatgtcaccagctaaagggctattcatgcacagaagggttgttattgtaatcatcatggtttctgttgcttttaccttgttaagaatacatgcgtggctcataattgtgctagaaaaccctaagggttttggttaaattacctgttgttgtatgttataaagtagacataaaattggccaaaatagattaaaattctacaaatgtggagtcaagtttctcttgactccaagagaaacttggaggcttaggaaagacagacctggaaaaaacccaataaaaggctaatcagaagctcagaaaaactgcaaccagctgtcctttatctacctatgacctggaagctcccaccccacttcgtgttgtcccacctttctggacaatgtacatcttacatatagtgatggatgtctcctgtctccctaaaatgtataaaactaacacatgccccaaccaccttgggcacgcattgtcacagcctcctgacactgtgtcaccggtgtgttcttaaccttggcaaaatgaactttctaaattgagacctgtctcgatactttgggttcaaattagtaatttcaggtagaaattaaaattcttcttacaatagaaacaaacaaaaggactaaacagagaaaaactaataaaagtgtgctcaaggccgggcatgtgctcacacctgtaatcccagcactttgagaggctgaggtggatcactcgaggtcaggagttcaagaccagcatcgccaacatggtaaaaccccatctctactaaaaatgcaaaaattagcaaagcacagtggtgcgtgcctgtaatcccagctactcaggagggtgaggcaggagaaccatttgcacccgagggcaggggttgaaatgagccgagattgcacaactgcacttcagcctgggtgacaagagtgaaactccatctaaaaaaaaaaaatctaaaatttatatggtatgacaaaaaactctgaagagcagaaggattcaagcaaaaaagaaaggctaaaagtatcatcctacttgactttgaaatatacagcaaagctatagtaatgaaaacagtatgatacttgaacaaaaatagtcacattggccaatggagaataaaagagaaaccagaaatacatccatgtatttaaggctaaccaattttttatatagatgacaatttcttaggaaaatgacagtatctttaaatgtaaagcctgaagctctgaaactactaaaaaatatatagattgaaagccctataacattggtttgggcagtgattttttttatttaacctcaaaatcccagggaactaaagatcatacatgtgacaaggggtgaatatcaagattatgtaagaaagtaaaaaacaaataactactaaaaatgagcaaaaggcttaaatatttttcaaaaaaagacatacatatggccaacagatatttaaaaatgctcaatgtcacttattatcagagaaaggcaagccaaaaaatctatgagatataaagtcactcatattagaatgattcttattaaaaagaaaaaaaagcattggtaaagatgtgaagaaaagggaatgcttgcacactgcaggtttgagtgtaaatgaggaaaaccattatgaaaactgaaatagagatttcttaataaatttaaaatcaaactaccatataatacagcaatttcactattggatatatatatttaaaaacaaatgaaataagaatgagaaacatttgcacttctatgttgtttgcaacactcttcacaatagccaaaatatagaatcaacagttcaacatccaatgagtaaatattgacaatgtagtatatatacacaatggaatactatttctcttttagaaagaaaactctattatgttcaatcacatggattaacctggaggacattatattagtttaaataagccaggaacagaaacattaaaattttatgatttcacctacacaggaatgatataaaacttaaattaagtagagagcaaaattgtaaccatcagacgccaaggtatttagaagaaagagggctttagaaagatgtttgtcaaagaatacataattataatagcatacaagtaacacattcaaaagactgattgtacagcatggtatctacagttaatagtaatgtatttttgaaaaatgctaggataatgtcatgtgctcttaccacaaaaatgttaactgtgtgaagtaaagcattaattacctaaaattaagcatttgacaatgtatatatatacttcaaaacatgttttacagaacatgttttatctatcaagttgaaaaatatatatttgaaacattatagaaggataccaattttttcaaatactctctgtctttgtcattaacttggctaaatagtatccaaaatatatttttgtgctgtttttgtcatttaatttttcagtcataaccataggagctctgacatttaacagcatgttctgaatgcagtactgtgcataggaggagccaatgtacattagggtttttattttaagcttgggacagcaggagtttctggggctaattgcaatggtatgaaagacattaaaagggcaggtgttgtttgttctcaagactggccactgtttgaacacagtaaacaagtttgcatgcaaaataataggaaatgttttaatctgaaagccatcgtaacctcatctccaaaattttttcagagaaaatgaccaaagagttgcctacagtgaggtgactaaaaataaaaactgtagactgaacttcaccaacttcaaaaattatacaacagtaaaaattttctccaaattgtaatatcagtatgaaaaataaacacttcaaatgtctaatcaacagagtacattttattatttttcaacatttaacatttacacttaaaaataggagtctgtataaaaatgtaacgtgctgtatcatagaaaattaaatttagaatccttacttaccactaactctcttttaaatataacttataagatatattttgtaacaaattttatgcttgccacactttgtgtaagaatccaataagattcttcttttacaaacaaagaaaaacaatgttaactgatttaattattccacgtgtggacagtgtatgtctcttattttaattaactaatctgaaagttatattggcaagcaaattctccacttaaaatccattttttagcacattaaaaatagcaacttttggccaggggtgatggctcatgcctgtaatcccagcattttgggaggctgaggaggtggggatcatgcggtcaggagttcgagaccagtctggccaatatagtgaaaccccatctctactaaaaatacaaaagttagctgggcatggtggcgcatgcctgtagtcccagctacttgggagactgaggcagaagaatcacttgaacccaggaggcaaaggttggagtgagccaagatcacaccactgcactccagcctgggtgacagaatgagactccatctcagaaaaaacaaaacaaaacaaaacaaaacaaaacaaaaccaaccaactttctcatcagaacctacaaaataccatgtaaaataacatggtaggaagacaactgagacaattgtagctgtaacacagaaaaagaattagaagaactgtgatgcatacatacttgaaatgaatatatgacaaacaaaactgaacataattaaaaaataaagaagcagaatttctctttaaattcagcaagagtaaactttgcatcctgggaaaaatgtcctctcaacatgaggaatcaatgtaatttcttctccattgatattttccattctgacttaaagttacaaactaactccaggaggaatacttatggcttatcatgaagcatctgctacacagcaagcactgccatgtttgtttgctgcatttatatacaaaaacatcctcttgacttatcgaagccttcctagtacttacctgaacaaacttgctcagtaaataaacttatgacaattttaaaaatagagaagaacaataaccaagtaaaagtgagcttatatagggttctccaagtaaaagaaataaatgaaatcttctaactaaataaaatataacttaatacactaattgtggaattacatctaaaaatcatttcatgtacactactaaatttcataaaaattattcttatactccatgaccagctcacataatgtatacttcataaactacaaaacaatatatgatatatatgagatatatatgtgatatatatatgagatatatatgatatatatatgatatatatatgagatatatatgagatatatatatgatatatatatgagatatatatgatatatatatgagatatatatatgatatatatgagatatatatatgagatatatatgatatatatatgaaatatatatatatgacatatatatatgaaaaaagaaaattgtgggtcttgcattgagtaccaggcaagtaaaaacaaagaaatttcatggggagattctgaaccataagatgtaagattttacagtaatgaattcaatacaaaccagagagtacagatttgctttccagattttttaggtttttggttttctagtaaattagtcaccttattacaataatttgttctgttctaataattttttttctgaaaataggtacaaactcataattacacaaacacacttacttcataattttcttctaaggtatagctttagagtaatatatatgtatgtttaaccctatgtaaataaaaactaaaagtctgcatggggctaccccctttgggtcccctccctttgtatgggagctctgttttcactctattaaatcttgcaactgcacactcttctggtccatgtttgttatggctcgagctgaacttttgctcaccatccaccactgctgtttgctgctgtcacagacctgccgctgacttccacccctccagatccagcagggtgtctgctgtgctcctgatccagcgaggtgcccactgccaatcccaatagggctaaggcttgccattgttcctgcatggctaagtgcctgggtttgtcctaattgagctgaacactagtcactgggttccacggttctcttccgtgacccacggcttctaacagagctataacactcactgcatggctcaagattccattccttggaatctgtgaagccaagaaccccaggtcagagaacaagaggcttgctgctatcttggaagcagcccgccaccaccttgggagctccaggagcaaagaccccttcatggcaaccacgaagggacctctaaagcagtgagtaaaattggaccactttcaccttgctattctgtcctgcccttccttagaattggaggaaaatactgggcacctgtcagccagttaaaaacgattagtgtggccgccggacttaagactcaggtgtgaggctgtctgggaaagggctttccaacaatccccaacccttctggattgggagcgttggtctgcctggaaccagcttccactttcaattttcctgaggaagccgagggctgactagaggcagaaagctgtcgtcccgaactcccagcgttagccgattgagatcatggtgcagccagaagtctctactcaacagtctcccatgcgtgcacccctacctttccttctgacccatatctcctgggtcctgactatgactttcttgaaagtgtagccccaaaattctccttatctctgaatctacttcctctgatccctgcctcctaggtactaatggttcagattttcatttactctagcaagttgtatctccaaagggatgtaaggaagctctacactgtgtccttaggcccctaggctatgaacccacaaagtcttgtccctggtgtccctcccaatttaggtatacagctctcagcatgggcagttacacaggacctgttccccaccacccttgccagggccccaagtttgtaaagagctaggagaaaagagagagagacagaggggagagaaagagagagagacaaagagggagaaagagagagagacaaagagggagacagagagagagagacaaagagaaagatagaagtagtaaagaaaaaacagtgtgccctattcctttaaaagccagggtaaatttaaaacctataattgttcattgaaagtcttctctgtgaccttataacactccaataccacttggctgtcagtgtaaacaagggcgtagccctaaagcactgaggccactgacaacccatagccttcctatcaaaaattcttaacccagtaacccatggatgggacaaatgcattcagtcagtagtggcactgctttgctataagtagaaaaactttagagggaacctcattgtgagcacaccttgccagttcagagctatcctaagtcaaaaaaaaaaaaagcaaaaaggtagcttactaactcaaatcttaaagtatgggactattctgttagaaaaaggtgatttaacattgaccactgaaaattcccttaacccagcagatttcctaacaggggatttaaatcttaattaccatacaaaggtccaaccagacctaggaggaactccctcatgacaggaccatagatggttcctcccaggtgattgaggaaaaaaaaaaaaacacacacacacaatgggtattcagtaattgaggtaaactcttgtagaagcagagttaggaaaattgcctaataactagtctgctcaaacgtgtgagctgtttgcactcagccaagccttaaagtacttacagaatcaaaaaactctatctcggtcctgactcaaaaggttacccacaccctctctgaagtgaatttgcatatgaactgttgtttgtaggaatgcatcttgatggggcatctgggttgttatgaaatattcaggaaccccgcctagctctagaactcacctatgagcacaaagtcaacattaggcatgctggtaaaggaccactagaatccagcagcccagacccctttctttgtggtcaagaaaggtgggaaaacaggtgcagaactgctacatcagtaaacgtaactaatccaataagcagaagtccatggggttacacactctggaaaggaataagcattaggaccatagaggatgctgcaggactaatgctcatcggaaaatgactaagggtactagcatccttatgttttttttttcagatgggaaacattccctccaaggcaaaaatgcccctaagatgtattctggagaattcagcccagtcagggtatatgtacctttttccctgtcagacttgaggcaaactgaaatagccctaggtaaattatcagataaccctgatggctatattgatgttttacaagggttaggacaatcctttgatctgacatggagagataaaatgttactgttagatcagacactaaccccaaatgagagaagtgccaccataactgcagcctgagagttcggtgatctctggtatgtcagtcaggtcaatgatagtatgacaacagaggaaagagaatgattccccacaggccagcaggtaattcccagtgtagaccctcattgagacgcagaaccagaacatgtagattgatgctgcagacatttgctaacttgcatgctagaaagactaaggaaaactaggaagaagcctattaattattcaatgatgtccactataacacagggaaaggaagaaaatcctactgcctttctggagagactaagggaggcattaaggaagcatatctctctgtcacctgactctattaaaggccaactaatcttaaaggataagtttatcactcagtcagttgcagacattagaaaaaaacttcaaaagtctgccttaggcctggagcaaaacttagaaaccctgttgaacttggcaacctcggttttttataatagagatcaggaggaacaggcagaatgagacaaatgagattaaaaaaaaaaaaggctttagtcatggccctcaggcaaacagactttggaggctctggaacacggaaagcctgggcaaatcaaatgcctaatagggcttccttccagtgtggtctacaaagacactttaaaaaagattgtccaaatagaaataagccaccccctcatccatgccccttatgtcaagggaatcactggaaggcccactgccccaggggatgaaggtcctctgagtcagaagccactaaccagatgatccagcagcaggactgagggtgcccggggcaagcgccagcccatgccaccaccctcacagagccccgggtattcttaaccattgaaggccaggtggttaaccacctcctggacactggcgtgtcagtcttactctcctgtcccagacaactgtcctccagatctgtcactatctgagggttcctaggacagccagtcactagatacttcttccagccactaagttgtgactggggaactttactcttttcacatgcttttctaattatgcctgaaagccccactcgctttttagggagagacattctagcaaaagcaggggccattatacacctgaacataggagaaggaacacctgtttgttgtcccctgcttgaggaattaatcctgaagtctggaaaacagaaggacaatataggcaagcaaagaatgcccgtcctgttcaagttaaactaaaggagtccacctcctttccctaccaaaggcagtacccctttagacccgaggcccaacaaggactccaaaagattaaggacctaaaagcccaaggcctagtaaaaccctgcaatagcccctgcaatcctccaattttaggagtacaggaacctaacggacagtgcatgttagtgcaagatctcaggattatcagtgaggccgttgtccctctatacccagctgtatctaacccttatactctactctgctttcccaaataccagaggaagcagagtgttttacagtcctggaccttaaggatgcctatttctgcatccctgtacatcctgactctcaattcttgtttttctttgaagatccttcgaacccaacatctcaattcacctggattgttataccccaagggttcagggataacccccatctatttggccaggcattagcccaagacttgagccagttctcatacccggacactcctgcccttcggtatgtgaataatttacttctagacgcccattcagaaaccttgtgccatcaagccaccaaagcgcttttaaacttcctcaccacttgtggctacaaggattccaaaccaaaggctcagctctgcttacagcaggttaaatacttagggctaaaattatttaaaggcactagggccctcggtgaggaaagtatccagcctatactggcttatcctcatcccaaaaccctaaaagcaactaagagggttctttggcataacaggcttctgccaaatatggtttcccaggtacggtgaaacagtcaggccagtatatacactaagtaaactcagaaagccaatacccatttagtaagatggacacctgaagcaaaagaggctttccaggccctaaagaaggccctaacccaagccccaatgttaagtttgccaacagggcaaggcttctctttatatgtcacagaaaaaacaggaatagctctaggaatccttacacaggttcaagggaccagcttgcaacctgtggcatacttgagtaagaaaattgatgtagtggcaaagggttggcctcattgtttacaggtagtgacggcagtagcagtcttagtatctgaagcagttaaaataatacagggaagagatcttactgtgtggacatctcatgatgtaaatggtatactcactgctaaaggaaacttgtggctgtcagacaaccatttgcttaaaaatcaggctctattaattgaaggactagtgctgagactgcgcacttgtgcaactcttaacccagccacatttcttccagacaatgaagaaaagagagaacgtaactgtcaacggtgattgctcaaacctatgtcactcaaagggaccttctagagattcccttgactgatccctacctcaacttgtatactgatgaaagttcctttgtagcaaaagggctttgaaaagcagggtatgcagtggtcagtgataatggaatacttgaaagtaatcccctcactgcaggaactagcgctcagttggcagaactaatagccctcattcgggcactagaattaagaaaaggaaaaagggtaaatatatatacagaatctaagtatgcttacctagccctccaagcccacacagcaatatggagagaaatggaattcctaacttctgagggaacacctatcaaacatcaggaagctattagattattattggctatacagaaacctaaagaggtggcagtcttacactgctggggtcatcaaaaaggaaaggaaagggaaatagaagggaaccgccaagcggacattgaagccaaaagagatgcaaggcaggaccctccattagaaatgcttatagaaggacccctagtatggggtaaccccctccaggaaaccaagccccagtactcagcagaagaaacaatggggaacctcacgacgacagtttcctcccctcaggatggctagccactgaagaaggaaaaatacttttgcctgcagctaaccaatggaaattacttaaaacccttcaccaaacctttcccttaggcattaatagcacctatcagatggccaaattattatttactggacaaggcctttttaaaaccatcaagcagatagtcagggcctgtgaagtgtgccaaagaaataatctcctgcactgcaggccatacatttcaattcctgtatctttaacctccttgttaagtttgtctcttccagaatccaagctgtaaagctacaaatcgttcttcaaatggagccccagatgcagtccatgactaagatctaccgtggacccctggaccggcctgcaagcccatgctctgatgttgatgacatcaaagccacccctcctgaggaaatctcaactgcacaacccctactatgccccaattcagcagaaagcagttagagcggtcatcagccaacctccccaacaggacttgggttttcctgttgagaagggggactgagagacaggactagctggatttcctaggccgactaagaatccctaagcctagctgggaaggtgaccgcatccacctttaaacacggggcttgcaacttggctcacacccaaccaatcaggtagtaaagagagctcactaaaatgctaattaggcaaaaatgggaggtaaagaaatagccaatcatctatcccctgagagcacagggggagggacaatgatcaggatataaacccaggcatttgagctggcaccagctaccctctttgggtcccctccttttgtatgagagctctgttttcactctattaaatcttgcaactgcaaaaaaaaaaaaaaaaaaaaaaaagtctgtaggtatgtgtttgcaggcacagtggccacatgttcaaagaaaaatagatgacaaattaaaaaaaatatttactcaggacccagatatgtatagattttatttacattcctatatgatttttattatgaccacaaaaatgacgctataataaagataacaatttagttttatatttcaaagtgactaaaagtgtagatttggattgcttgtaattcaaggaataaatgttgaaggtgaagaatccctcatttaccctgacgtgattattacatattttatgctggtatcaaaatatgctatatatggcagaaatatatctacacactatgtacccataaaagttaagaaaaataagtttaaatttgtcaaggcaaaaaaaaaaagaagtttaaataagattaaaagtataaaaatgtaacctacgagaacaatattctttaatttatttgcaggttaaagccactgaaaaaaagagattactagagatgttattccactcttaccaaatagtaaactgttgccatctcttacctacacccttgagtaaggtgggataggttaaagcgagtggcataataacacttcattgaatgtacaacagacttaacatgtcaaaaaatgtttaaaaaattaagtttacatataatctaaaaatttatgaatgtactacattacataaaagcacaactaatataatacatcactaatttaattttaattttaactaaaattttaaaatgtttttctcactataatgcacaaaaatatattcctcagaacacctacctcatacatcactcaatattttaagttaaccacaaaaagcctctccatttagatttttatcatgcattttatattttaatatcctttctcttttatgaaaaaggtcataaataatgcccatctaataaaaaagaatctttcatatctctgatgcagcaacaattgatcgcatgctttcacatgtaaataaagtaggaatgaagagcatgaagtaacttgagagttgaattacatccttatttgcttttcagagtctgtaatttttttcaatattgtgatgttaatttttttgatatttgaagtatacaaaaagtatacttcaaatgtaattataattctccaaaaaatcacctcctcttttttaagttatatgcaaataacttatctaaattttagattgaaattattttttttactcaacactctgatttagtgtagtctgaagtgccagtgccttatcatttctactgtgaattctctgacatttacagagttaattttggattgaatatttttcatatttactgcatctacaaaaaaaacttactctgttttctaagctgtagtttataaacttttttccaaatttattacatttgcaggtttttttctctattatacattccctgatattgaacaaagtttgagcaactttagggtttttctctagcacaaaatatgcacaataagatctgtgatacaaatatagtactacaaccgtctttatatttgtaatgtttgtcatcaaaagaaatactcttcaccattctaaggtttatattttctaaaagatattctcacagtaattgcatttttaatatttgttttaagtataaactctgtgatgttaagatgtgagcagatattaatggcttttccacattcttcataggtgtacattttttttcaagtataaatgctttcctatgcgataaggtgtgagtattggttaaatattttgccacattcttcatagttttctctaggataaattagcttatactcaagtgtgacaaccatttaaaggctttgtgacatgactcacatctagggcttcttgacactatgatttcttttatgtttagaaaagtttaaggtgttctcaagagcactgtcatgtcttttaggtttgtagagcttctctccagtatgatttgataacttattaaaaactttgccacattcgaccgggctcaatggctcatgcttgtaatcccagcactttggggcactttgggaggccaaggcgggtggatcacttgaggtcaggagttcaaaaccagcctggtcaaaatggtgaaaccccgtctctactaaaaatacaaaaattagctgggcgtggtggcaggcgcctgcaatcccagctgcttgggaggttgaggccagagaatcgcttgaacccaggaggcggaggttgcaatgaactgagattgcaccattgcactccaatttgggcgacagagtgagactccatttcaaaaaaaaaaaaaaaactttgccacattcttcacatttgtagaatttctctacaacataaattatcttatgtgtaataagggttgaaatgtttttaaagcttttgtcacattcttcatatttataaaatttatcttctgtatgaattctcttatatttagtatgagttgaagaccagttaaagactttgttacattcttcacatttgtcgggtttctcttcagtatgaattatcttaatgtgtggtaagatgtgagaaatggttacagtgtttgccacattcttcatatttgtagggctagtttccattatgaattatcttatgttcagtaaggtttgaggacgttaaaagctttgcaacattcttcacgtttgtagggtttctcttcagtataaattgtttattaagaattgaagaattaggctgggcacggtggctcacgcctttaatcccagcactttgggaggccgaggcgggcagatcaccagaggtcgggagttcgagaccagcttgaccaacatggagaaaccccgtctctactaaaaatacaaaattaggtgggcgtggtggcacatgcctatagtccctgctactcgggaggctgaggcaggagaatcgcttgaaaacccaggaggcggaggttgcagtgagccgagattgtgccactgcactccagagcctgggcaactagggcgaaactctgtttcaaaaaaaaaaaaaaaaaaattgaagaatgcttatggcattattcacatttgtagggtttctctcccattgaattatgttgtttagcaagagttgaggactggctaaaagcattgccactttcttcacatttgtagggtttttctccagtacgaattttcttatgtctaataaagtttaactgattaaaagcattgccacattcttcacatttctagagtttgtcttcagtatcaactattttctgttgagtaaggtctgaaaaccagttaaaagctttgccacagttttcatatttgtagggtttctcttcagtatgaattatcttatgttcagtaaggtttgaggaccagttaaaagttttgccacactcttcacatgaggcgggtttctctctaatttatcttatattcagtaagatctgagaacccgttagaagctttgccacattcttcacatttgtaaagtatctctccagtatgaattatcttatgttcagtaagttttgagaagcagttaaaagttttgccaaattctttaaatttgtagtgttcctctccaagataaattattttatgttgagtaaagtttgaggactggttaaaagctttgcccattcttcatatttgcagtgtttgtctctactatgaattatcttatgttcagtaagatttgaggactgattaaaagctttgccacattcctcacatttgaagggtttatcttcagtatgaattatcttacattcagtaagatttgaggaccagttaaaagctttgccatattattcacatttgtggagtttatcttctttaggaattctctcattttgagtaacagctgagcaatggttaaaagctttgtcacctttattatatttgtagggttttcctccagtatcaattattttatgtgtatttaaggtgtgaggactggttaaaggctttgccacattctttacatttgtggggtttctctccagcatgaattgttttctgcctattaaggcttgaggactggttaaaagctttgccacattcttcacatatggagggtctgtctctagtataaattatcttatgtgtattaaggtttgtaaaatggttgaaagctttgacacattcttcacatttttagggcttctccccagtatgaattatcttatgtttagtaagggctgaaagatggttaaaagctttgccacattcttcacatttgtaggttttccctccagtatgaattgttttatgttgagtaaggtgtgaggactggttaaaggctttgccacattcttcacatttgtagggtttctctccagaatgaattatcttatgtttagtaaggtttgaggactaaatgctttaccacactcttcacatttgtagggtttctttccagtatgaattatcctatgtttagtaaggcgtgagaaatggctaaaagctttgccacgttcttcacatttgtagggtttctctccagtatgaattgatttatgtttagtaaggtgtgaggattgcttaaaagctttgccacattcttcacatttgtacggtttctccccagtatgaattatcttatgtttcataagggtcgagaaattgttaaaacctttgccacattcttcacatttgtacggtttctccccagtatgaattatcttatgtttcataagggttgaggaattgttaaaagctttgccacattcttcacatttgtagggtttctttccagtataattatctcatgttttctaagggctgagaaatgcttaaaagctttgccacattcttcacatttgtagggtttctctacagtatgaattaccttatgttccataagttttgagaccacttaaaagctttaccacattcttcacatttgtatggtttctccccagtatgaattatcttatgtttcctaagggctgagaaattgctaaaagctttgccacattcttcacatttgtacgatttctccctagtatgaattagcttatgtttcttaagggttgaggaattgttaaaagcttttccacattctccacatttgtagggcttctccccagtatgaactgctttatgtctagtaaggtgtgaggactgcttaaaagctttgccacattcttcacatttgtatggtttcttcccagtataaattatcttatgtttcctaagggttgaggaattgttaaaagctttgccacattcttcacatttgtagggtttctttccagtatgaattatctcatgttttctaagggctgagaaatgtttaaaagctttgccacattcttcacatttgcagggtttctctccatatgaattaccttatgtaaagtaagttttgaggaccactgaaaagctttaccacattcttcacatttgtaggatttctctccagtatgaattatctcatgttttctaagggttgaggaattgttaaaagctttgccacattcttcacatttatagggtttctttccagtatgaattatcttatgttttctaagggctgagaaatgcttaaaagctttgccacattcttcacatttgcagggtttctctgcagtatgaattaccttatgtacagtaagttttgaggaccacttaaaagctttaccacattcttcacatttgtagggtttctctccagtatgaattatctcatgttttctaagagttgaggactggctaaaagctttgccacattcttcacatttgtagggtttctttccagtatgaattatcttatgtttcctaagggctgagaaatggttaaaagccttgccacattcttcacatttgtagggtttctcttcagtatgaattactttatgtctagtaaggtgtgaggaccacttaaaagctttaccacattcttcacatttgtagggtttctctccagtatgaattatctcatgttttctaagggttgaggactggctaaaagctttgccacattcttcacatttgtagggtttctttccagtatgaattatctgatgttttctaagggctgagaagtggttaaaagctttgccacattcttcacatttgtagggtttctccccagtatgaattgctttatgtctagtaagatgtgaagattgcttaaaagctttgccacattcttcacatttgtatggtttcttcccagtatgaattatcttatgtttcataagggttgaggaattgttaaaagctttgccacattcttcacatttgtagggtttctttccagtatgaattatcttatgttttctaagggctgagaaatgcttaaaagctttgccacattcttcacatttgcaaggtttctcttccatatgaattaccttatgtacagtaagttttgaggaccacttaaaagctttaccacattcttcacatttgtagggtttctctccagtatgaattatctcatgttttctaagggctgaaaaattgctaaaagctttgctgcattcttcacatttgtagggttgctttccagtatgaattatcttatgttttctaagggctgagaaacgcttaaaagctttgccacattcttcacatttgcagggtttctctgcagtatgaattaccttatgtacagtaagttttgaggaccacttaaaagctttaccacattcttcacatttgtagggtttctgtccagtatgaattatctcatgttttctaagggctgacaaattgctaaaagctttgccgcattcttcatatttgtagggtttctcttcagtatgaattatctcatgttttctaagggttgaggactggctaaaagctttgccacattcttcacatttgtagggtttctttccagtatgaattatctgatgttttctaagggctgagaaatggttaaaagctttgccacattcttcgcatttgtagggtttctctccagtatgaattgctttatgtctagtaaggtgtgaggattgcttaaaagctttgccacattcttcacatttatatggtttcttcccagtatgaattatcttatgtttcataagggttgaggaattgttaaaaactttgccacattcttcacatttgcagggtttctttccagtatgaattatcttacatttagtgaacattgaagagatgttaaaagctttgccacatttcttatatttgtagggtttgtcttcagtatgaattatcttatgtttaataagggttgagaaccatttaaaggctttgccacgttcttcacatttgtagatattctctctagtatgaattctcttatgttgaattaagtgtgaaagcatgaaaaatgatttgctacatttcatacatttgaaagttttctttttagtgtgtctaatcttatatctatttgaatttgaatatttatgaaagactttcacatatttgttacactgaaatatttttccctgggtagttgtccaacattggttaagtttattataagcttcttcgtgcatcttaccctcattgacactttcacaatcttttcttaatcgtaaattcttatgtccacatcttgcatatgttctcaatattatttcttggaaagaatcttttatgctctgatctggccaaaagtcttgtgtaaaatgagaactaataactggaagaaatgaaaataataaattatgtcacttgctagactcagatgaatatactttacaaatctaacctataaaattatacaaaccgcttaagcaagatggcacagcaaaataagacaggccctaatttcttcatagacatataaatgtaataaaaacatactgaccaaaatatatttgttgaaaatttataaataagttaagtgtgtagagtgccccaagtaagtacaatgcaaacagccacataaaaggaaagagaagtctgttacagtttcccaactcagctcttcctgctccccaaaatgacatggtgtcgttagaagtaaattgctggctgggaatggcagctcacacctgcaatcccagcacttttggaggctgaggcaagtggattacctgagatcaagggttcaagaccagcctggccaaaatggaaaaactccatctctactaaaaattcaaaaattagccaggcatggtggcacacgtctgtagtctcagctacttgggaagctgaggcaatcacttgaacttgggatgtagaaattacagtgagatgagattatgctattgtactccagccagcgtgacacagtgagactctgtctcaaaacaaaaaaagtaaattgccatctcctgatttcatttctaaagacatataaaacagtggcacatacatatttatttctggcttctaggggcctttccagactggtttatgtttctcatgacacaaagtactgaaagaaatggtggcatactttaaaatgacagcttgaggccgggcacggtggctcaggcctgtaatcccagcaccttgagaggcctaggtgggcagatcacgaggtcaggagatcgagaccattctggctaacacggtgaaaccgcgtctccactaaaaatacaaaaaattcgccaggtgtggtggcgggcatctgtagtcccagctactcaggaggctgaagcaggaaaatggcatgaacccgggaggcagagcttgcagtgagccgagatcatgccactgcactccagcctgggcgacagagagagactctgtctcaaaaaaaaataaatgaataaaataaaatggcagcttgaatctgctgaaaccaaagttaaatattacagcagcagagaatgtagtaccacacacaaaaaatagattactattgagaagaaacatgagtaacattctttatctaaaaaaaaaaaaaaaaaaaaaatttcaaacaagatgcattctaagaacatgtttgacatactcccagaatctctagccaagacaattggtttcagatttccaggacaaggctacattatgaagactgtaacaggtagcttttttgatgtacaaattttaattaattattataatgtatatggaatactagggcaacatggcccaatcaaaaaaagtataaaatttttggaaaacaaccataaaacaatgaagattaataaattaatttttaaaatttcaaataaattaaataatactgaataagagacataggaacacagaccactataaaaaattttaaaaatgaggatacctcttcccctaatggcgtgaggtaattcatgaaaatggcttgctattcacctaagccagagaatcccgcaatatcatgctaaacaagaggttcataagagctattcttatataagacaaaataaactttaaagcaacagcagtttaaaaaaacaaagagggacattatacaatggtaaaaggtcttgtacaacaggaacatatcacaatcctcaacatatatgcacctaacactgaagctcccaaatttataagacaattactagtagacctaataaatgagatagacaccaacacaataataatgaggacttcaatactccactgacagcactagacaggtcatcaagacagaaagtcaacaaataaaaaatggatttaaactataccttggagcaaatgcacttaacagatatatacagaacattccatccaataactgcagaatatacattctactcaacagtgcacgaaaccttctccaaatagaccgtatgataagccacaaaatgagcctcaataaatttaagaaaatgaaattatatcaaacactctctcagaccacagtggaataaaagtggaattcaactacaaaaggaaacttcaaaaccatgcaaatacatgtaaattaaaaaacctgctcctgaataatcattgggtcaaacatgaaatcaaaatggaaatttaaaaattcttcaaactcaacaacaaaagtgatacaacctatcaaaacctctaggatacagcaaaggagatgctaaaaggaaagttcatagtcctaaacacctacatcaaaaagtctgaaagaacacaaaatgacactcttgttcacacctcaagaaactagagaaacaaggacaaaccaaacccaaacccagaagaagaaaaaaaaatagtcacagtcagagcagaatgaaatgaaattgaaacaaacaaacaaaaaccaaaagataaataaaacaaaaacctggctctttaaaacgcataaatacaattgatagaccattagcaagattaaccaagaaaaaaagaaaatccaaataacctcaataagaaatgaaatgggagatattacaactgacaacacagaaatacaaaagatcattcaaggctactatgaacacctttaagtgcactaactagaaaacctaaaagaaatgaataaatttctgcaaaaatgcaacccacccagcttaaatcaggaagaattagataccctgaacagaccaataatgagcagcgagattgaaatggtaatttaaaaattaccaagaaaaaaatgtctaggaccagacagtatgcagcagaattctaccagacattcaaagaagaattgataccaattctattgacactattccataagatagagaaagagggagcccttcctaattcattctatgaagccagcatcaccctaataccaaaaccagaaaaggcattaatcaaaaaagaaaaccacagactgacgtccctgatgaaaatagatgctaaaatccttaacaaaatactagctaactgaatccaacaacatatcaaaaacagaatccatgatcaagtgggtttcataccagtgatgcagggatggtttaacaaatgcaagtcaataaatgtgatacaccacataaaaagaaataaaaacaaaagtcacaggatcatctcaatagatgcagaaaaagcattcaacaaaatccagcaacgctttatgattaaaactcttagcaacactggcatacaagggacatacatcaagataataaaagccatctatgacaaacccagagccaacataatactgaatgaggagaagttgaaagcattccctctgaggactggaacaagacaaggatgcccactttcaccccacttcttcaacatagtactggaagtcttatccagagcaagcagaaaagagaaaaaaataaagggcatcaaaattggtaaagaggaagtaaagctgtcactgtttgcggatgatatgattgtttactttgaaaaccctagacttttcaagaaagctcctagaagtgataaaataattcagcaaagttttcagatacaaaattaatgcatacaaatcagtagctcttctatacaccaacagcgacgaagcagagagtcaaatcaaaactcaaactcttttacaatagctgtgagaaaaaaaaaaaattaggaatatacctaaccaaggaggtaaaagacctctacaaggaaaactacaaaacactgctgaaagaaatcacagatgacacaaacaaatggaaacagtccacgttcatggataggtagaatcaatattgtgaaaatgaccacactgccaaaagcaatctacaaattaaatgcaatttccatcaaaataccaccgtcattcttcacagaattagaaaaaattattctaaaatccatatggaacaaaaaaagagcctgcatagccaaagcaagactaagcaaaaagaacaaatctgaaggcatcacactacctgacttcaaactatactataaagccatagtcacaaaaacagcatggtactggtataaaaataggcacataaaccaatggaacagaatagagaacccagaaataaacccaaatattacagccagctgaacttcgacaaagcaaacaaaaacataaagtagggaaaggatactcttttttttttctttccttttttttttttttttttttttgagatggagtcttgttctgtcacccaggctggagtgcagtggtgtgatcttggctcaccacaacttctgcctcccgggttcaagcaattctcctgcctcagcctcccaagtagctgggattacaggtgcctgccactgcacctggctaatttttgtatttttagtagagatggggtttcatcacattggccaggctggtcttgaactcctgacctcatgatccacccgtctcagcctcccaaagtgctgggattacaggcatgagccaccgcgcctggccagggactcttttcaacaaatgatgctgggataattggctagccacatgtaggagaataaaactggatcctcatattttactttatacaaaaatcaacacaagatggattaaggacttaaatctaagacctgaaagtataaaaattctagaacattggaaaaacccttttagacattggcttagacaaggatttcataatcaagaacccaaaagcaaatgcaattaaaacaaacataaattagggagggttttctctctatcttgtggaatagtgtcaaaacagggacttaattaaactaaagagcttttgcatggcaaaaggaacaccagagtgaacagacaacccacagagtaggagaaaatcttcacaatctatacacctgacaaagaagtaatatcttgaatctacaatgcactcaaacaaatcagcaagaaaaaaaaaaatcccatcaaaactgagctaaggacacaaatagacaattttcaacagaagatatacaaatggccaagaaacatatgaaaaaatgctcaatattgctaatggccagggaaatgcaaatcaaaaccaccaaaggataccaccttactcatgcaagaatggccataataaaaaataaataaataaaaaaacagatgttggtgtggatgtggtgatcagggaacacttctacactgctggtgggaatgtaaactagtacaaccactatggaaaacagtgtggagattcctaaagaactaaaagttgtactaccatttgatccagcaatcccactactgggtatctactcagaggaaaagaagtcattatatgaaaaagatacttacacacacatttatagcagcgtaattcacaacagcaaaatcatggaaccaacccaaatgcccattaaccaatgagtggataaagaaactgtgagatatatatataatggaacactactcagccataaaatggaataaattaatggcattcacagcaacatggataagattagaggctatccttctaagtgaagtaaatcagaaatggaaaaccaaacatcgtatgttctcactgatatgtgggagttaagctatgaggatgcaaaggcataagaatgacacagtggactttggggacttggggggaagagtgggaggaaaacgagggataaaagaccacaaatagagtgcagtgtatacagctcgggtgatgagtgcacaaaaatcccacaaatcaccactaaagaacttactcatgtaaccaaacaccacttgtacctcaataacttatgaaaaaataaaataaataaaaaaaaataaagtagtacacaggttacttgaagacgaaaaaaaagagctttccaaattttgatgtaataaaaaaaattcttaatccataatacttgatcagaaattattttactttaaaaaacaataaaaaataaagactttccaaaatgaaaggtaagggtgttcatcaccactagcacagttaaaaaaaaaagctacatggtggccaggcacagtggctcatgcctgtaatcctacacctttaggaggccaaggtagtcagaaaacttgagaccaagagttcaagatcagccccaaaacagagtgagactgtgcatatataacaagagaaatgctaaaatgagtcttttatgttgaaaaataaaatgatgctagacagcatcaaaaaaccgtatatgaatatatagctttctattaaatgtaaacatacagacacatataaaatgtcttactataataataggcataatacccttaaaattcttctatagaatataaaaacaaaatataaatctgcataaatctgaatacacaatataaaataatttgtaatattaataacaaacttgaaaatatagaaatatagtttttgtattcaattaagttgttatgatattaaaacacattgatttaatcttaagatgttttacataatgtccatttttcaacataactacaaaaattttatagaaactacgcaaaacaaaataaaaaaaataagcaaagtgtgccactacaaaattaaacaaaaaatagttaaacaagaaatgagacaaaatatgtaaaaaaaaaaaaaacataaaacataacaatgaaactggtatgtaactttatttcttttcttttctttttttttttgagatggagtctcgctctattgcccagggtggagtgcggtggcacgatctcagctcaccacaacctacgcctctgggttcaagtgattctcctgcctcagcctcccaagcagctaggactacaggcacgtgccaccatgcctggataatttttgtattttcagtagagacggggtttcattgtgttggccaggctagtctcaaactcctgacctcgtgatccacccacttcggtctcccaaagtgctgggattacaggcatgagccaccgtgcccggcataactttatttcttatttctttttttttttttgagtcggagtttcactgttgttgtccaggctggagtgcaatggcgccatctcggcttaccacaacctccgcctcccgggttcaagcaattctcctgcatcagcctcccgaatagctgggattacaggcatgcgccaccacgcccggctaattttatatttttagcagacatagggtttctccatgttggtcaggctggtctcaaactcccaacctcaggtgatccgcccacctcggcctcccaaagtgctggaattacaggcgtgagacaccatgcctggcgtaactttctttaagaaatcattttaaatataaatttatcaaactacttaataaaaagaaatgtaattccaggactttcggaggccaaggtgggctgataacttgattccaggagtttgagaacagcctgagcaacaaagcaaaaccctgtctctaccaaaaaaaaaaaaaaaaaaaaccaaaaaactagctgggtttaatggcatgggcctgtaacccagctacttaagaggttgaaactagaagattatctgagtttgagaggctgaggctgcagttcactgccatgattacaccattgcaaaacagcctggttgacgaagtgagaccctatttcattaattaattaattaaaaggaaaagaaagaagatgcctgagtggcttaagaaaagaagcatacaatatgttctctacaagagaccaattttagcactgagtcaaatagtctgtaagtaacagaatttaaaaaaatctatatttcatgcaaatagtagccacaattgggtgaggtagtcgtaattatattgggcacaatatgctttaagtcaagtactagtacaagaaaaagattgatattatataatagtaaaatgggtcaatttaccaggaatctataactattatatttatatgtacaggtaggtataacaacaggcctccaaaatatataaatattgacataggtgaagcaagaagtacatagcaacataacagttgcagacactgagaccccattttcaataataatagaaaattcatatagaagattaagaaaatagaaaatgtagataacattatggactgtaatattttacatacagagaaatatctgagagtaaataatttataacagaaaagtttatttggctcacagttcaacagactgtacaagaagtatatgccggtatctgtttctggtgtgttctcaggaagcttatgatcatagtggaaagcgaagagaaactggacatatcacatggtaagagatagagcaagtgtgaggtaaaagagccaggttttttaaaaatagtttctcaaaactatacagatatttgtgtgtccccaatatggaaaagcagtcagattgtgcagtcccttatatgccatgaacacaactttggctctcactgtaaacttgaagggaaattaccaaaacgaaaatagaatccttagagaattttaaagcataagacagaagatgccctacatgagagcaaaattttaaaaaatctcagtcttcccagaaactacttcctttggagcacagcttctcaggtcacattttgagaactggctttctcctggacctctggacctcttatttgtgttgtttcttgtattcactctcacatacctgggggtttagttaccatctcatgtctcttcatattccaaggctctttcccttgcttcagacaagttatcaagtctagcttagagacagcgatacctgttttattaaaaataaataacataaatattgctcatattccccaaataatgtgctcattaaagagaatgtaatagaatattctagtaaattgatccctcaatactaatttataacataaatttctaaatatttagaaaatattttcaatttgtacagtcccttaattttactacctggtactactgaatcaaatattggtggtggcaatgagatttcaaggtgtggcaactacattttatgccactaaatttcttcaattttcactaatctagagtgaaaaatgcagatctgcttagaaatgtggaaagttcaggtaaaaattaaacatctttaaaaaattcctttctggccgggcatggtggctcacacctataatcccagcactttgagaggccgaggcaggtggatcacctgaggtcaggagttcaagaccagcctcaacatggagaaaccccgtctctgctaaaaatacaaaattagccgggtgtggtggtgcatgcctgtaatcccagctactcaggaggctgaggcagaagaattgcttgaacctgggaggcggaggttgtggtaagccgagatcgcaccattgcactccagcctgggcaacaagagcgaaactctgtttcaaaaaaaaaaaaaaaaattcttttctacactttcaaatccctgttttcagaaaacgggtatctgaaacttatttatgctaagcataaatcaccaaaacacatcctacagaaaagagaaatgaaacctatagaatataataggaattgcttaattaaaatcatcctcacccaggaagaccaggtttctgtagttctctaacataacattcctatataaattctgctgagccatgtccaggcattgccactcctccagagcgaattctatggtcacatcccaaaatgtcaacgatccctgaaaaacacaacaaagatacatatagatttcccaattggccatggacagaatttttaatttgactcaaggtgaaatgagagagtaaagagaacaggttctaacttacagggatgactgaacgtattcagtaaaataattttcaacacagaaatcgtctcggctgggcgcagtggctcatgcctgtaatcccagcactttgggaggccaaggcaggaagatcacgaagtcaggagattgagaccatcctggctaacacggtgaaaccccgtctctactaaaaatacaaaaaattagccggcatggtggtgggtgcctgtagccccagctacttgggaggctgaggcaggagaatggcatgaacccgggaggcagagcttgcagtgagctgagattgctgcactccagcctgggcgacagagctagactctgtctcaaaaaaaaaaaaataaagaaaagaaaaaaagaaatattctctaatgtattctcaaactctgagaaaaaaagaatggcagaagatccacaacaccagcacagacaagatacttttctggataataaagtataaaattaagggcatgataacatgtacatttttgagtgctatttttaaatcatacagaataagtcttgtacatttttcagaccaaaaagacatgttgagttagaagacacctctcaaattttaatgtgtacaattaactggagatcttgttaagcatatttattttataagatctggaataaagtctgagtttctgaatttgacaagctcaccagtaatgcctgtttttggccccaaaagaatcttttgttaaatattcagcaagtggaggagcctgtatttttcccagtttttctgccctataaacaaagacgagagccctcattttccaaagatagatatatgcagagaaaatctaagaaaggcaggtgccagattaaatgtgatcattggtgcacatcagctacataaagatacttaataacgaggagaaaaatagttaactctatactgaaaaaacctgtcagacagctttttttttttttagacagagtttctctcttgtcaccaaggctggagtgcagtggcgcgatctcgactcactgcaaccttcgcctcctgggttcaagcgattctcctgcctcagcctcccgggtagctgggactacaggcgcgtgccaccacgcgcagctaatgtttgtatttttagtagagacagggtttcaccatcttggccaggctggcttcaaactcctgaccttgtgatccacccacctcggcctcccaaagtgctgggattacaggcataagccaccgcgcacagctcagacagcactttaatcaagtcaatcattaacatcaactgcagtaggacaaatttttatgatgtgctgatgcacacagaagggcacacagaaggacacagcattactgctgtgatattgctcccccaaagtaaattataatctgaatttaaccataaagaaacatcagtttatgcaaatgtcaagacacagataactcccattttttgtaacttttaatagccattttaagcagactttctttagcacactagagagcaggtatctcctaaccatttttttcagaactttttttttttttttgagatggagtctcactctgttgcccaggcgggagtgcaatggtgcgatctcagctcactgcaacctccacctcccgggttcaagcgattctcctgcctcagcctcccgagtagctgagattacaggtgccccacaccacgcctaggtattttttgtatttttagtatagacggggtttcaccgtgctggccaggctggtctcgaactcctaatctcaggtgatccacccgccttaaagtgctggggttacaggtgtgagccactgcaacttgcctttaaaaagcattttctttttttttttttttttttttttttttgaggcagagtcttgctctgtcgcccaggctggagtgtagcagcctgatctccgctcactgcaagctcggcctcacggattcacgccattctcctacctcagcctcccgagtagctgggactacaggtgcccgccaccacgcccggctaattttttgtatttttagtagagacagggtttcaccgtgttagccaggatggtctcgatctcctgacctcgtgatccgcctgccttggcctcccaaagtgctgggattacaggcgtgagccaccgggcccagctaaaaagcattttcttaaagctgttctgcatagagctaatggagaacacagatggagcctcaacattacatgttctactttttccgtaaggaccccagcttttccccaataggaatcttgagtatccacaccttcccctattcaacaaccacaggtgaaactttttttttttttttttttttgagacggagtcttgctctgtcacccaggctggagtgcaatggcaccatctcggctcactgcaacctctgcctcccgggttcaagcgattctcctgcctcagcctcctgagtagctgggattacaggcgtgtgccaccacgcccggctaatttttgtatttttagtagagacagggtttcaccatattggccaggctggtctcgaactcctgaccttgtgatccgcccgcctcggcctcccaaagtgctgggatcacaggcgtgagccaccgcgcccagcctgctctggcacattctaaataatatgtctacctaggaaaaatctgaggaaacatagatataagttgaccgtttatttgggccaagcttgaggactgtaacctgggagcaaatattcaagttgcctgaaatatatacttgattagcagtgtgattacaagttgatttgtaaaggctaaaaaagatggacagagagtgagttgatacaaagttgtctgtcagaaatttttatttatttacaggaataacattgattattgattggatatacaccattagtttttaggtacaagttatagtgtccagtgtggcattattaatatatagctacttgtggcaatagtgaacagcttcaaaagatgaatacatagtgcaaaaaacaaaaagaaggtcgggtacggtggcttgcgcctataatcccagcactttgggaggcgggcagatcacctgaggttgggaactcaagatcagcctgacaaacatggagaaaccctatctctactaaaatacaaaattagcctggcatggtggggcatgcctgtaatcccagctattcgggaggctgaggcaggagaatcacctgaacccgggaggcaggggttgcggtgagccgagatggtgccattgcactccagcctgggcaacaagaacgaaattctgtctcaaaaaaaaaaaaaaagacagagagaaagagaattctactctcattttagtgtctctataagtttgacaactaaaaggacttgcatctctcagaaagaaagtttttcttttttctcaaatctgaaaacctggattcagaatttgaagttgcagttttaggtcctgaatggatggagtagcagcaggtgttccctgcacatctgtgggcattttaacaagaggaagaaaaaggaagtagagattcccatgtgtacatgtctactcaatgcacacatgttactgtgactgggtttctgggccccatggtctgtgaatcagtttcagatgtgaagatacaagagtcactgaaaaaggtaaaacggctgtttgctgccctgtgaagtttgtagaattctgatctagcctctctaaaagttactgtggaggactatagataccaaattggcagagaaacaattctgcctgcatatttaggggacagcatgcactttgcagcacaattgtgagttgaatgatagcctgagagggaaagtttcctctagcttaaagcttgggtggcaccttatatttttgtaacatgtctgataattctagagtttttgtgaaacataaaagacaaattttcttcagccccggagaaactccacaataatagaacagacataaaactgttgtattacacaattaaacctgaacgtgacatgcatcacagtcagtctgcttaagagactgcaaagacaaaaggatggtcaccttaattagttaacaagtagaaaatttatagcaccatgtcatacatagttattcctaaattcacctggtaattgaaaaggctagccatgtaggctaatcagttatgttcaatgacaaaataaacttttcatatcttcatgaaaggaggtaattttgcaacttgaagccaggtgcctgctgaaggtaggctctcaatctcctacaaaaatggttgaatagggtgctatctttttggctatttatattttaaagcaatggctctctactccctgagcactggggctactcctctcccgcttgcactctcctgttagctggtgtcctctcttgacccctaccatctgccattgaggcagagctcacagctgaaagctcacatcttacataaaccacaactgccacagcagcactccagtgacacctcagagagggaagcctgagctgcaggagaaaagcctgcaggcctcctggggagaactgcaccttcacattaatggaaattggaacagtaattcagcctcagtttttatttacaatggtgacatggaaaaaccactgctggatttccaacatgagtccagacagagatagctccaaaagttcccactgtgacagcccacctcttttacagacaccagggaatacttacaatgcagacacccaaagcactggacagaaaaacagctctcagtctgagcaagattatgctgagaggaaaaaagaagttaaaaccatcttaggtaaaaactcagtttagacgtaagattgatcaagtcagccagaaaatactatcttaaaaagaatttctctctcaacaagcaaaatacacaactactctcagcatgagaaacatgagcattacgaagaaaaggggcatattctcagcagaattttagaaggtttctcttccatctctgctgctctctcatctcctagccattgaatgggggttccatattgaaatacatctcacaatttccaccagcactttttgatgaagatttataatctgactttgttcatatactggaatatatttaagcttgccacatagctaactaaagagctattatggtttttgggtggccacatcatctgtgtttatttgtcctgtaatagcagcattccgatttagtgaaatgaaagacactattaacaggccaggcacagtggctcacatctgtaatcccagcactttgggaggccgaggtgggtagatcatttgaggtcaggagttggagaccagcctggccaacatggtgaaaccccatctctactaaaaatacaaaaatgagctgggcatggtggtgggcgcctgtaatctcagctattcaggaggctgaggcaggagaatagcttgaacccggaagacagaggttgcagtgagccgagattgtgccattgcactccagcctgggcgacagagcgaggatctgactcaaaattaaaaaaaagaaaagaaaaagaaaacaaaagtcagagataacacaaataaatggaaaaccattttatgctcataggtagaaaagatcaaaatcattaaaatggccatactacccaaaaacggaacagatttaatgctattcttatcaaactaccaaaaacatttttaacagaactataaaaaactattttaaaattcatatggaaccataaaagagcctgagtagccaaggcaatcctaagcaaaaagaacaaagctggaggcattacattacctgacttcaaactatgcaacagggctacagtaaccaaagccacataatactggtacaagaaacagacttatagaacaatgcaacagaatagagagcccagaaataatgccacagacctaaaaccacctgatctttgacaaaactaataagaggaatgtgggaagaaatccctatttaataaatggtactgggaaaccacctagcagtatgtagaaaattgaaactggaccccttccttacatcatatacaaaaatcaactcaagatgaattaaagccttaaatgtaaaacttgaaattataagaaacccttgaagataacctagaaaataccattttacacatgggaactaactaagattttatgatgaaattaccaaaagcaactgcaacagaagtaaaaactgacaaatgggacctaattaaattaaatatcttcttcacagcaaggaaatcatcaacagagtaaacacacaacctacagaataaaagaaaatatttgcaaactatgcttttgacaaaggtctagtatctagaatccataaaaaactgaagtttacaagaaacaaacaacctccttaaaagtaaacaaaacgcagccaggcgcggtggctcatgcctgtaatcccagcactctgggaggctgaggcgggtggatcacctgaggtcaggagttcgagaccagcctggccaagagggtgaaacccagtctttactaaaaacacaattagctgggcgtggtggtaggcacctgtaatctcagcttctcgggaggctgaggtaggagaatctcttgaacccgggaggcagaggttgcagtgtgccgagactgtgccactgcactcgagcctaggcaacaagagtgaaactccacctcaaaaacaaaacaaaacataacaaaaacctagtagacaaaaggctaagagtaagattaaaggctcacgcctgtaatcccagcatcttgggaggccaaggagggaagatcacttgagatcaggagtttgagaccagcctggccaacatggttaaacctcatctctactaaaaataaaaaaattagctgggtgtggtggcaggcgcctataattccatccactcaggaggctgaggcaggagaatcacttgaacccaggaggcgaaggttgtagtgtgctgagattatgccactgcgctttagcttgggtgacagagtgaggcttcatctcaattaaaaaaaaaaaaaaaagtaaacaaaaaacatgagcaaactttttccaaaataagatatatatatatatatatatatatatatatatatatatatatatatatatatatatggctaacaagcctatgaaaaaaatactcatcactacagaaaagcaaagaaaaaccacaatgatataccatctcatatcagtcaaaatggctattactacaaagtcaaaaaataacagatgctggcagttgcagagaaaagcgtatgcgctgctgctaggagtgtaaattagttcaaccattgtgaaaagcagtgtggcgattcctcacagaactaaaagcagaattaccatttgacccggcaacctcataattgggtatatacccaaagaaataaaaattattctgtcataaagacacatgcacatgcatgttcactgaagcactattcacaatagcaaagacatggaatcaaccgaaatgcctatcaatggtaaactggataaagaaaatatggtacaggtaaggtttggtggctcatgcctgtagttccagcactctgggaggctgaggcaggtaaattgcctgagctcaggagttcaagaccaccctaaacaacatggcaaaaccctatgtcaacaaaaaatacaggaagaaaaattagctgggcttggtggcacacacctgtagtcccagctagttagggggctgaggtagaagaactgtttgagcccgggaatttgaggctgcaataagccaagatcatgtcactgtactccagcctgggtgacagagacccattttcaaaaaataaaataaagtatttagcaaaaacaaaacatggtatataaacatcatggaatactgcattgccataaaaagtgaacaagattatgtcatttgcagcaacatagatggagctggagaccattatccttagaaaactaatgcagaaagagaaaaccaaatgcatgctctcatttattagtaagagctaaataatgagaacacaaagaggggaacaacacacacccttctagttaagggtggaggacaaagaggatcagaaaaataatacctgtgtggtgctgtgcttaatacctcagtgacaaaataatctgcacaccaactcccgacacaatttcctctatgtaacaaacctacacatgtactcctgaatcaaaaataaaagttaaaacaaaaaaactctatgggtgaaagagagtgcaatgcaggtggaaggactggtttgtgctacagatagtggcccaggtacggctctactctgattaatttttgggttcatgctggcagatgatattatgaacaggttgtccagaacctcatgttggtggaaaaaacatgttgctgctgcagattcagtgtctggggttgggatatgccaggagacttgtagacacttgagtgagatttggcaggaaacactaggatcaaaaatgctgtagtgaaattcctgagggtggtaactagttctaagaggggtgtggataagccagtgtccagtggatatgcttgtaagaaggtgggaatcctgtgatggcagcagtggaaaaaggcggtctgttcgcatattctcactcataggtgggaattgaataatgagaacacttggacacagggtggggaacatcacacaccagggcctgtcgtggggtggggggaggggggagggatagcattaggagaaatacctaacgtaaatgatgagttaacgggtgcagcacaccaacatggcacatgtatacatatgtaacaaacctgcatgttgtgcacatgtatcctagaacttaaattaaaaaaaaaaagaaaaaggcggtctgttattagaacttttttcctcttttttatcctctctcaccctgggaggagacctgaaatcacagggtaatgggcagtgtgatggcctgtgtacagaaaagcagagcctcccattcctagacacccagagatccattccagaccaggcctctgtgatatctctcagctggaaccaaatttgtagagtttgctaaacaccaagcaattctcccacaccaactcactgtctgacattctccaacaccaactcactgaattctgacaccacccagagtcagcacacaccctgattcagggctcagtctcacaacattgttcttactgaaaaagccagtcacaaaccccatgggcccatctttgcttctgagctactgtttaaaaactggggactctcataacattcctcaaattcaataattttatagagctagtcacagaactcaggaaaacactgtagttacatttatcagtttattagaaaagatacaatccaggaaaagtcaaatggaagaaatgtataggacaaagaaaagatgtggggaggctgagcacggtggctcacacctgtaatcccagcactttgggaggccaaggtgggcgatcacctgaggttgtgagttcaagactggcctgaacaacatgaagaaacctcgtctctactaaaaatacaaaaaaattagctgggcgtggtggtgcctgcctgtaatcccagctactcaggaggctgaggcaggagaatcgctccaacccaggaagtggaggttgtggtgagccaagattgtgccattgcactcaagcctgggcaacaagagcaaaactctatctcaaaaaaaaaaaagaaagaaaagaggtggggaaagataaagcatatagataatcctggtaaatagctgtgattaataaaattctctatcctttgtgtgctccaggaacagtttctggaaagaaacacccttcccattatgacttcgatggtgctctcttttcttacctatcacatagccagacacagactctgcacattgtctcctttttctcattaaaaaataaataaataaatcgggccgggcgcggtagctcatgcgtgtaatcctagcactttgggaggctgaggcaggcggatcaaaaggtcaggagttcgagaccagcttggccaatatggtgaaacacggtctctactaaaaacacaaaaattagccaggcatgatggcagatgcctgtagtcccagctcctcaggaggctaaggcaggagaatagcttgaacccgggaggcggaggttgcagttgagtcaagatcgtgccactgcactccagcctcagcaacagagtgagactctgtctcaaaaaataataataataaaaataaataaataaatcagctgagtttgttttcagtggtcaacctaaaatatttcttaatcaaacattacttatttaaacaggcttctgaactttgagctaccctcagtctgagtcaacatacaaccttatttttatgtagttcctaagtacatgatgacttcagtgtaaaacattctctgatctaaaatctctttctttcaccctccattcgccatcccctccgacctcctctctaatatggtttgctcttccatatgaaacaaggcccttgtctgcctaaacttagcaatccttaaagatcttatagttggtatttcctcctgttgcaatacccttttggaattcaattcttttttcaacataaatctaacttcgttttattttacaaagtctagaaactatctcaaaacaataacaatttcatcttcagtaagaccctcccaatcccctttcatcttaaccttaactgcatctgcctgtgggtccccagctttccagggttctgtggcttccctcaggataaagtctccttccatgactggggtgagcaggctgggatatctgcagagaagactccccagaaaaaactaactgatcctttaataacctccttttgcaggctcagtattagccttagcttagagtcactgggctcaggctttaatcttcatgtcagagttattcccttggtttttgaaagtaagtgttcgaaaaattcagtgcaattactctaacacagtgttcatataagggaaggaaattttaaggtgcttacactttatatctcaataagagaaacaaaagtatctattcttttcagacaataaatgtattattttactatttccattaaaaatcatgtagtaggccaggcgtggtggctcatgcctgtaatcccagcactttgggaggctgaggcgggcggatcacctgaggttgggagttcgagaccagcatggccaacatggagaaacccccgtctctactaaaaatacaaaattagcggcgtggtggcacatatctgtaatcccagctactcgggaggctgaggcaggagaatcacttgaacccgggaggcagaggttacagtcagccaagatcgtgccattgcactccagcctgggcaacaagaatgaaactctgtttcaaaaaaaaaaaaaaaaatcatgtagcaaacaattagtcatatggaaacatttctagaaggtacaaagtttcagcatgaaactcagatagcaaagtaataggatacagaatagagatagtcactgttacaaatttaccctgcaaaaggaggaactgatgttttcatgaatctaaggaactcaccaattaccaccttttcttgtggaaatatgtgcattttctaaagccaaaatggaagagagattttccctatttttcttccttggtagcatttgaaaagtcaagccttgaaattctgtttaaaatcacccaaccataaaaaacacaccagagaaaattcctaaagtcattctgggaaaaaggtaaatgaaaatttttaacaaatggaatatacaattcaatattaattttattctgaaacccatctcttttttgcccttggttaagtattttcttacctttcaatccctactaacaaaatgcaatttacagttaaaaaactgaggtcaaaataagtgaacaaatcttttcaaggtacagatgtgtctgattcatgtgtcaagtcaggccatccaatcacttaagagattctcccaccccattctcctcacttaagtgcccaataactccttctcaggagactctgaactatgccccagtgagtgccccaggtaagaacttttcaagttcttacaccatctcattggggtcactttttttttttttttttttttttgtcgtttgggacactatttttgatttcacagattctcactatttttctttcactattttttcattatatttcactattgttctgctcccttaaagaatgcagggggcagaaattatttctgtgttttccccgcaataccagcatctgattggctgaccagcaatgtgtcttcaaaaaatggaagctgggttgggtgaagacaatcttaatgtctcaagggttagcttttcaaaggaagagtataccaggagagacctctcaaccccagggcatctgccttcttcgttgaaaggctacactccacacctcaggttgtcctactggagaaaatgaccaggagctgatattcactagacactctagcagacatagccatggggaatattttagctaattcccagacagtactgaaacccaggaccagggaaaaaactgaagaatggctgaaaacacatcataaagtttccaaaggaaaacctttacctttaccccaaaacattctgctaaaatctgtggagcaaggaggaaaaaaaaaaagcggcacaaagattttttacaacacagtgtcaggggattattttttgctttcttctcttaggaaatattcacaaacagaaaacaaatattatgaaaagtaccatccaatgctttgttaaaaaataaaatacagtatcaaaatgtacactaaggacaaatagtaatgtgaatcagagagggaaaattgacattatgaactggaagtttagtattttattgcaagccagagttaggctgcaggaattggggtttgggagtagacataatactctgcttgagatacctgtaaaaaatggaggggaaaatcagtcatctgaggagtgtgaaaataattaaaaataattaagtggcaggcaaatagactgaggtggctctagtgcctgatatctacttttttttttctttttttttaagacagtttcggtcttgttgcccagaatggactgcaatggcgcgatctcggctcaccgcaacctctatctcccgggttcaagcaattctcctgcctcagccccacgagtagctaggattacaggtacaggcatgtgccaccacacctggctaatttttgtatttttagtagagatggggtttctccatgttggtcaggctggtcttgaactcccgacctcaggtgatccgcctgcctcggcttcccaaagtgctgggattacaggcatgaaccaccgcacctggcctttttttttttttttttttttttaatatgagagggagtctccctctcttgcccaggctggtgtgcagtggcgcaatctcagctcacagcaacctctgcctcccgggttcaagcgattatctgcctcagcctcccgagaaactgggattacaggcatctgccacactcccggctaatttttgtatttttattagagacggagttttaccatgttagccaggctggtctagaactcctgacttcgtgattcacccgcctcggcctcccaaagtgctgggattacaggtgtaagccaccgagccaggcctgataatctactttttaaaaaatctaattcggccggacgcggtggctcatgtctgtgatcccagcactctgggaggcggaggagggcagatcacctgacgtcgggagttcgagaccagcctgaccaaaacggagaaacctcgtctctactaaaaacacaaaaattagccgggtgtggtggcggatgcctgtaatcccagctactcgggaggctgaggcaggagaatcgcttgaacctgggaggcggaagttgcgttgagccgagatcgcgccactgcactccagcctgggcaacaagaacaaaactccgtttcaaaaaaagaaagaaaaaaatattaataattcaagtgcttttttttttgtaaattactacattgggggaaacaaaattcaggcttaaccaactataaactacaattaacctctgattatataaacgggaaatttccatcttgattgtacaaattaagaatctacgtaactgtacataacccattactgaatttggttttcttcattatgcaccttataaaactctttccgtcaaatcccttccatagaccataaactacaaaccacagctgggtgctctgccatttttgaatcactctttgattaaatcctttattactttagtgatgactgccatcaatttttaataggagaaaagagggactggaaacctcactggaccaaagctcttcccattcatgaacccgcacccggagtcaggattctcccctgacgcccctcccgtggtccctgcacaatctgtgagagaggaggcgctgcgggtgaagagcggcccagagagggctccaggccagggcatagtcacagtgcaggaaggaggcaggtcgcccggggtcccgcagtcagcgcagccgccatcttatggctgaaggagactgaggccgagctgggcaagagctcggggcgcagactgtggagctcactgaggggaggcctgagtcccgccacagccactttccaccggttccagtcagccccttccccttctcaggatatcggacccggcactctcaccatttctaagcttccagggggtcctggcgtcctagctgtggatctccaaatacctacaggtcacagggccacagaggctaaggacacagagcagtaaaaacgagatccggagctccagctggaaccagaaacaacggccccgccacatcccacaagccgccctttccgctccagctgagtgcctgattggacggttcccagcccagagtccctgattggataatgtttaaatccccgcctcctcaggccctgagtgacagaagatgtgatctgatgctgagctgaatgaagagtgacgggccgggcgcggtggctcacgcgtgtaatcccagcactttgggtggccgaggcgggtgaatcaccagaggtcaggagttggagaccagcctggccaacatggcaaaacccggtctctactaaaaataaaaattaggctggtgtggtggcgggcgcctgtaatcccagctactccggaggctgaggcacgagaattgcttaaactcaggaggcggaggttgcagtgagccgagatcgcgccagtgcactccagcctggatgacagagcgagattctgtcacgaaaaaaagaaaagaaaagaaaaagaaaggaaaggatgacagtctaggctgcagccttttcaggcagggcttccttcctgaactgagccaggccaaccccagagggtatttgcatttaaccttttgtataaggtcacattcttttataaataatatattatatggttattcacaaatgaaaagaatataacaattatctaaaattttcagagtttatgaccttcctggcttctggttttttcatcagattgcctgaggttttaaaaagaaggcaatcctctgaaataaaattgtattttaaattttctagtagccaaactttaaaaattaaaaaaaaaaaaaacaggtggaatttattgtagcaatttaattaacccaatatatccaaaatatcatcttaatacgtaagcaaaatgtaaattataaatgaagtgtagatattttttggaacttcatctttgaaactaactctgtattttacctttccagcacatcacagttcagaccagccacattccaggcactcagtcgccacacatggccagtagctgccacattgaagtgcagctctgaccttaggagagggaagggcctgaacaaaccttttctgccaaagatggaaaaagagcctttccctaccaacatctctcttcagctctgagggaggaacagatagtagccataaataaagcacaggacagcaggaaaaaacaaccacaggtagaccactgctggccacctgttgcctacctttattccagagatcagaaggtgaactaaggatggtaaggccacaggagaagaaatctctgtgtcttcaaatctgtgcacagtcttgacctccaatgtttagatatgaagaaaatagattaaaggaaaacttacttttctatttgtccttggccctaatggtcaggctgtggttatctgttttctcctgtggtatgggggactgtgtgagtataggcaccaattacatgcatacatgtccacatatatttctgcattactcagcattctcttacgaggcctccaactttatatcaggggaaaaatcagtacctatagggtacccactgttagaagagaactagtaatcaacttgtcaatgaatcctggcatcctatctgcactgggtgcatgtattaattagctattgcagcacaacaaatcattcaaaacttatttgctcataattgagatggtcagctatttagggtgggctcagtgaggctgttctttttgtctcagctgagctcctccagacatgtatcttcagctgtttgttgaataggcagctgtgcttctggggatgagcttctgcttctggggctgtcaacaggggcaacttgcttctcctccccatggtatcttatcctccagctggctaacatgggctttattcatggagatggcagcattctgaaagaaaaacagaagcattcaagaccttttgagcctacgccccaaactagtacattgtcatgttcacaggtttctactgccctgagtgaataaggccagcaaaatctagggtttgaaaagcattctggatcttgatgggaacagctttaaaagcacctacaatgggcatggatacaggaaaaactagaaattgctaccatttttgaaatcagtatcattctgcctttgtttatttgtttgtttgttttgcatatgtggtttatagaactctttcacatcaagaatcttgtccaaagacacacagctactaagtggctgggctgagactcaggatcaactctgtctgactccaaagcccacacacctccatagatgacactactaaagtagctgccctagacccttgaagtgtcctggagggtgacacttccacagtagaagccagattccttttattttttttttattaatctatttcacttcttttgagacagggtctcgctctgtcacccaggctggaatgcagtagtgcaatctcggctcactgtaacatcctcctcccaagttcaagtaattctcctgtcacagcctttcaagtagctgggatttcaggtgcttgccaccacacctgactaatttttgtatttgtagtagagacggggtttcagcatgttggccaggctggtttcaagctcctgaccttaagtaatctgcctgccttggtctcccaaggttctgagattactaacatgagccactgtgcccagcctacattccttttacatttgtgccaatatagtactgtttatcattgggaataatcctctcaagaatttgcagaagtgcacagtggctcacacctgtaaacctagcattttgggaggctaatgtggaagaattacatgagctcaggagttcaagtgcaggctgggtaacatagtaagaacctgtcttcacaaaaaaaaatttaaaaattagccggacatggtggtacatgcctgtagccccagctactcaggtggcagaggcagaaggatcgcttcagcctggagggtcaagctgcagtgagccatgtttggatacaccactgcactccagcctgggtgatagagtaagatgttgtctcaaaaaaaaaaaaaaaaaaaaaagaatttgccaaagcattttaaaaagacatagaatactggccgggcatggtggctcaagcctgtaatccctgcactttgggaggccgaggtgggtggatcacctgaggtcaggaattcaagaccaacctggccaacatgatgaaaccctgtctctactaaaaacaaaaaaattagccaggcgtggtggcgggtgcctgtaatccagctcctcaggaggctgaggcagaagaatcacttgaacccaggaggcagaggttgcagtgagccgagattgcgccattgcactccagcctgggcaacaagagcgaaactgcatctcaaaaaataaaaaaaaaagacatagaatactttgtgtttgtagctgatggataagtttagaaaatcgaaacccaacaacagattatttttcatcacagaaaaaatttgaaaacttttaaaagaaaaatactttagagaaattaaatttaaaagagtttaaatgggcaaagaatgatttgcaaattgggcagcctgtggagccagagtaggctcagagagactgcagcatagccacatggtggaaaaagatttatggacagaaaaagcaaagtgacatacagaaaatgggggtgagatacagaaacagccagattgattacagcttgagatttgccttactcaaacatggtttaaacagctgatgttgttttattgccaaaaacacagtagttggtagaagagtgggttacagtctattcacatatccagttaggtttcagtttactatgtacagaaaacctattgacaaaaattaaacagaaaagacggcagctttaggctataactgatttaacaatttctcccttttggtcatcttctcaattttgagagataaaccaaaactttagacattgatagcactctgtcaccatcaaaagtgtacttatttagtctcaaatcccactgtgaaatagcagaactgtgggttttgtaaagcgaaaacaaggacttcaggttattattattactattattattgttgttattttttttgagacagagttttgctcttgttgctcaggctagagtgcaatggcatgatcttggctcaccgcaacctctgcctcccaggttcaagcgattctcctgcctcagcctcctgagtagctgagattacaggcatgcaccaccacggccggctaattttgtattttcagtagagaccaggtttctctatgatggtcaggctagtcttgaactcccaacctcaggtgatccgcccgccttggcctcccaaagtgctaggattataggtgtgagccaccgtgcttggccctattttttttaaaaaaggaattacagtagagggaaactccttgtgttaaaatctgctgtttacagaagaaagcaaagcctggactgctttaggatctacttatttccttacatttttagtgtgattatgtcatatttagcatgagtgactccatacaataatggattttttaaaaattctcagataatttcctcatgcttttttccagataattttattcttcatcacaggccattttttggttgtttttctttttctttttttaattttttaaattttttttttaaccattggttcattttgcctgacatcatacaatacgtattattttatttcaagcttgtcttatctggcagatttatgagatacatccagagtgtgtgatttagtagttcatttttttctatggctggatggtattctcttgtatgaatgagatacaatttgttcatctatttttatagagatggatatttagtttgttccttgctgtaagctatatgaccaaaaacgcctataaacattcttgtacaaatactttttggtatataactaaattcctttattagcatttaagtgacacctctttacatttcttagtggtttctccagggatcactatatgcatctgtaacatatcacgatctacctagagtttatactgtactattttaataaatgtaaaatatgaaaaccttgctgttgaagagtttcaattacctctttttattcatatattttacatctacacatcattatatctcacaataccgtgttataacttttccttaaatagtcataagtcttatagagaaattgacagtaaatagtgtttataaatatttggaggcaggtactttggggctatgtaaatacactatttatcctttaaatcttacccacaatttttgcattttaaagtacaccttgtctacagtaattattactgtggtgtcttagtggtgattttctattttgcattatgtgtctacattgattagtacttggaattttgtaaaaaacattttttctctttctttttttatttatttatttttctatctgtagggattcatgaattttttttattctctaggttttaatccaatgctattaatgtatattgtgtttttcacattttttcaccttggactcctgagaagtctttcaggttgattttctctgacatggctgcttctgttgttttttttttttttttttttttgagatggagtctcgctctgtcgcccaggctggagtgcagtggaatgatctcggctcactgcaagctccgccttccgggttcacgccattctcctgcctcagcctcccgagtagctgggactacaggcgcccgccactgcgcccagctaattttttgtatttttagtagagacggggtttcaccgtggtctcgatctcctgacctcgtgatccgcccgcctctgcctcccaaagtgctgggattacaggcgtgagccaccgcacccggcctgcttctgttgtttataaaccacttttaaactttctgacttcacaatactctaccttaatttggattttccactccagtgctagaattgtctattattacaagtagtcttgctttttttttaattgaagaatagtacttagaaaccgtgatatagagctaggtgtgcccattaatactggggtgtcactgcttctgcaacctctcagcaaacagagtttggaaaggtacatattaatattgactcctgtatgaacacatctctctctttctctctctctcaatggatatgttatgacacatgcatttatccaaatattctcaactcgtctagaattatctttttttttcaacttcagttagaagcaggcactaattatgttacatatatatactaacatatagagtgcttttaaagattgctaatctaggccaggtgcagtggctcacgcctgtaatcccagcactttgggaggctgaggcaggaggatctcgaggtcaggagatcgagaccatcctggccaacatggtgaaaccctgtctctactaaaagtgcaaaaattagcttggcgtggtggcatgtgtctgtaatcccagctacttgggggctgaggcaggagaatcgcttgaaccagggagtcagaggttgcagtgagctgagatagcaccactgcactccagcctggtaacagagtgacactccatctaaaaaataaataaataaataaataaataaataaatgctaatctatacgcttatagacaagcaatacctaccagaacacaatgtttgtgttcagttcttgagtcttgcagtatttaatcaaaatactgttattcaaagtgatttacaccaagtccttttattccaacgtttttcaatagggttaggtgatacatttctagtaaggttaagctcttctttttactacctgcattttacctgaattttccccaaatccttgttttttataatttgcagagaggaaaaatttattctttgtgatgtacagttccataagttttgaaaactgtctagagtcacatagccatcttcacagtaccacacagaactgcttcattgcccccaaaattatctgatgcttcctatttatagttaactctaccctcatctattctttggcaatcagtgattattttctttttatttttcttttgtagggaggtctttctatgttgcccaggctggtctcaaaatcctgggctcaaacaatcctctcagctcagcctcccaaagtgctgagattatatgcttgagccatcaagcgtggcctgattattatcaatccctacaactttatttttctacaatgccatataattggattatataatttgtaccctatcggatcttactttcttcacttaaagaaatgcatttgtgactcatctatactgtgatgtcgatcaatggtttttgtttgtttgtttgtttattgacaactaggattctattgtatggatgccccagtttgtttattcattcacctgttgagaagcatctggtttacatctagctttttgcaattacaaataaagtgagcaatagacatctacaaaaaggtttcatttctacattagttttcagtttgctttagtaataacctagcagtgggatgtcgtggtaacataataagtgtatgttcaactttgtaataagccactaaagtgttttccaaagttatatcatttcatatttctagttctagttaacccaaattttcatccacactctttgaaatttttctttttacgattgccattatcatatttgtgtgtgatctcattgttattcatgcttcatttttttccatttctgttgggaaacccgaattatataatcagtgcagaaagaaatgtataaaatgcttaggcattagccttggattctggaaactgacttccagaaatctgctatgcaattagagctttacaaacattaaaaaaaatagtttattatctgtggttttctttttcttttcttttcttttcttttcttctctttctttttctgagacaaagtcttgctctgctgcccaggctggagtgcagtggtgcagtctcagctcactgcaacatccccctttacagttcaagcgattctcatgcctcagcctaccgagaacctgagattacaggcaaatgccaccatgcccagctaatttttgtatttttagcagaaacagggtttttcgtgttggcaagccttgtctcaaactcctaacctcaagtgatctgcctgacttgaatttcattctctttctttcttttgagacagattctgtctcacccaggcaggcatgcagtggcatgactgcagctgactgcagcctcaaccatctgggcccaagcagtttttctcacctcagccttctgagtagctgggaccacactcatgtgccaccatgctcagctaatttattattattatttttagaggtgaggtcacactatataacccaggctggtctcaaactcctgagctaaaagaatcctcccacctcagcctcccaaagtgctggaattacaggcaggagtcaacatatccacattgaggttttattttttatatcaaaatatgaaaaatagcattgatgtccattaatagaattcaagaaaatgttatgcatattaaaaaagtaatttcgccgggcgcagtggctcacgcctgtaatcccaacactttgggaggctgaggtgggcacatcacgaggtcaagagatcaagaccttcctggccaacatggcaaaaccctgtctctactgaaaatgcaaaaagtagctgggcgtggtggcttgcgcctgtagtcccatctactcgggaggctgaggcaggagaatcacttgaacccgggaggcagaggttgcagtgagccgagatcccaccactgcactctaacctgaagacagaacaagactgtctcaaaagaaaaaaataataataatttcaaaagcaaatactaaaattcaaaacaaattgaaataaaaataactaaatattatatagatatatgaccagaaagagagacgtttagttttcttgactttatttatttaatttcttttatttatttatttatttatttatttatttatttatttttgagatggagtttcactcttgttgcccaggctggagtgcaatggcgcgatcttggctcactgcaacctccacctcctgggttcaagtgatactcctgcctcagcctccccagtagctgggataacaggcatgtgccaccatgcccagctaattttgtatttttagtagaggcggggtttttccatgttggtcaggctggtctcgaactcccgacctcagatgatctgcccacctcggcctcccaaagtgctgggattacaggtgtgagccaccacgcccagcctgactttatttatttatttacattttattttgctttaagttccgagatacatgtgcagaacctgcagtttgttacataggtaaatatgtaccatggtggtttgctgcacctatttaccaatcacctcagtattaagccccacattaattagctatttgtcctgatgctgtccctccccttgcccctctgacaggcccgggtgagcgttgctcctctttctgtgtccatgtgttctcattgttcagctctcacatctgagtcagtaatgcaatgtttggttttcttttcctgtgttagtttgctgaggatgatggcttccagcttcatccatcttcctgcaaaggacatgatctcattcttttcttatggctgcatagtactccatggtgtacatgtactaaattttctttatccagcctatcattgatgggcatttgggttggttccatgtctttgctattgtgaatagtgctgtaataaacataagtgtgcatgtatctttgtaacagaatgatttacattcctttgagtatatacccagtaataggatttctgggtcaaatgacatttctggttctagatccttgaggaattgccacactgtcttccacaatggtttaactaatttacactcccaccaacagtgtaaaagcattcctacttctccacagcctcaccagcatctgttgtttcttcactttttaataatcaccattctgactgacatgagatggtatctcactgtagttttgattcgcatttctcttatgatcgtaatgttgagctttttttcatatgtttgttggctgaatgaatgtcttctttagagaagtgtctattcatgtcttttgcccactttttgacagggttgtttttttcttgtaaatttgtttaagtttcctgtaaattctggatattagaccgttgtcaaatgggtagattgcaaaaattttctcccattctgtagattgcctgttcgctctgatgatagtttctttttctgtgcagaagcttttttgtttaactagatctctttgtaaatttttgcttttgttgcaatcgctttcagccatttcattataaaatcttcacccatgtttatctcttcaatggtattgcctagattttcttctagagtttttatggtttggggttttacatttaagcctttaattcatcttgagttaatttttgtataaggtataggagaggggtccagtttcagtttgctgcacatggctagccagtttttccagcatcatttattaagtagggaatattttccccattgcttgtttctgtcaggtttctcaaatatcagatggttgtagatgtgtgttcttatttctgaggtctctattctgtttcattggtcaatgtgtcagtaccatgctgttttggttactgtagccttgtatagtttgaggtcaagtagcatgatgccttcagctttgttattttcacttagaattttcttggctacgcaggctcttttttggttccatatgaattttaaagtagctttttctagttctgtgaagaatctcaaaggtagtttgatgggaataccattgaatgtataaattactttgggcagtatggccattttcatgatattgattcttcctatccatgaggatgaaatgtttttccatttgtttgtatcctctcttatttctttgagcagtggtgtgtagttcttttttttttcttcttcttgagatggagtttcgctcttgttgcccaggctagagagcagtggcgagatctcagctcaccacaacctccgcctcccgggttcaagcgattttcctgcctcagtctctcgagtagctgggattacaggcctgcaccaccacgcccggctagttttgtatttttagtagagacggggtttctccatgttggtcaggctggtcttgaactcctgacctcaggtgatctgcccacctgggcttcccaaagtgctgggattacaggcatgagccaccgtgaccagcctggtgtgtagttctttttgaggaggtccttcacatcccttgttagctgtattcctaggtattttattctcttgtagcaattgtgaatgaaaattcatgcatgatttcaaaatctgcttgtttattgttggtgtataaaaatacttgtaatttttgcacattgattttgtatccagagactttgctgaagttgcttatcagcttaaggagtttttgggctaagacaatgggattttctagatacagcatcatatcatctacagagactatttgacttcctctcttcctatttcaacaccctttatttctttctcttgcctgattttcctggccagaacttcaaatactatgttgaataggagtggtgagagagggcattttgtcttgtgctgattttccagaatgcttccaggttttgcctattcaatatgatattggctgtggatttttcataaatacatcttattattttgaggtatggtttttcaatacctagtttattgagagttattaacatgaaggggtattgaattttgttttttatttgtttgtttttttgagacagagtctcactctgttgcccaggctggagtgtagtggcacagtcttggctcactgcaacttctgcttttcgggttcaagggattctcctgcctcagcctccccagtagctgggattacaggcacccgccaccacgcctggctaatatttgtatttttagtagagatggggtttcaccatgttgatcacactggtctcaaactcctgacctcgttatccacctgcctcagcctcccaaagtgctgggattacaggcgtgagccaccatgcctggccaaggaatgttgaattctattgaagactttattattattattattattattattattattattattattatttgagagagagtctcgctctgtcacccaggctggagtgcagtggcataatctcggctcaccacaacctccacttcccgggttcaagcaattctcctgcctcagcctcctgagtagctgggattacaggcgtgcaccaccatgcccgggtaatttttgtgtttttagtaaagacgaggcttcaccatattggtcaggctggtctcaaactcctgacctcctgacctcctgattcgcccacctcagcctcccaaagtggtgggattacaggcgtgagtcaccagccggccgttattgaagaattttactgcacctattgagataatcatgtggtttttgtcattgtttctgtttatgtgatagattacatttattgatttgcatatgttaagtgagctttgcatcccagtgatgaaggtgacttgtttgtggtggataacttcttgatgtgctgctggattcggtttgccagtattttattgaggatattcacattaatgttcttcagagatattagcctgaagttttctttttttgttgtgtctctgccaggtttcggtgtcaggatgatgctggtctcataaaatgagtagggaggagtctcttcttttcaattatttggaatagtttcagaagaaatggtaccagtagtataggaattattaagaaattattttaggcagttagcaagggtaaaaaagttctcagtgaattttttctttaatagaaagcagcgaaaaaccatttcttttctaacataaagcagcctgaaaagtcaagctgcaagcataaataagcaagctggaagtttgcatagatgaatgtgggcagctgtactaaaagccaggaccacccagtatggcaattcccccttccttttctttgtccccatgtatgcagttgtcgtggagccggccaggtagaggccacatttgcataataaaagattgggatgggagggccagtttttttgcaggctgtgtaaatagtacacttgggcaaaccaatccttcgagccctatgtaagtcaatcaccccctcctcaagcctttctaaaaaatcaattgcatcctgttccaaacctggaaaaacttcttgggcgcccgctttctctgcataaggaagctgtctttctcctgctcttctttctttcatctgttaaacttcctgctcttaaaaccccctccaaggttgtgtgtccgtgtcattaatcttctcagcatgagataatcaaccccgggtatttaccctggacaacgatgctgcttcaccagctcctctttttacctctggtagaattcggctgttagtccatctggtcctgggctttttttgttgttgttttggttggtaggctatttactactaaattttggaacttgattggtctgttcaaggattcgacttcttcctggtttaggcttgggagggtgtatgtgtccagaaattgatccatttcttctagattttttagtgtatttgcgtagaggtgtttataatattctctgttagtttgtacttttgtggggtcaccggtgatatcccatttatcattttttattgtgtctatttgattcttctctcttttcttttttattactctagctagtgatgttgtagcaggacaagcggcagacaaaagccctcagacaccaagttaaagaaggaagggctttattcagctgggagtttcagcaagactcacgtctccaacaactgagctccccaggtgagcaattcctgttccttttgagggcttacagctctaagggagtctgcctgagagggtcatgatcagttgagcaagcagggggtacatgactgggggctacatgcacaggtagtcagaacagaacagaacaggacagggattttcacaatgcttttccatacaatgtctggaaactatggctaacataactggttaggtcaggggtcgatctttaaccaggcccagggcacggcgctgggctgtctgcctgtggatttcatttctgccttttagtttttacttcttctttctttggaggcagaaattgggcataagacaatatgaggggtggtcacctcctttagtgtatgtattttattaatttcttaaaaaaaaaaaaaacagattctgggccaggcacggtggctcatgcctgtgatcccagcacttttggaggccaaggtgggtggatcacgaggtcaggagtttgagaccagcctgaccaacatggtgataccccatctctactaaaaatataaaaattagggctgggcgcagtggctcacgcctgtaatcccagcactttgggaagctgaggcatgcagatcacctaaggtcaggagttcgagaccagcctgaccaacatggagaaacctcatctctactaaaaactcaaaataagccaggagtggtggcacatgcctgtaatcccagctactcgggaggctgaatgaggagaatcgcttgaacctgggaagtggaggttgcagtgagccaagatcacaccactgcactccagcctgggcaacaagaacaaaatccatctcagaaaaaaaaaaaaaggccaagcatggtggcgcactcctgtaattccagctactcaggaggctgaggcaggagaattgattaaacctgggaggcagaggttgcagtgagccgagatcttgccattgcactccagcctgggcaacaagagtgagactccatcccaaaacaaaaacaaaaacaaaacaaacaaacaaaaaaaccagctcctgaatttattgattttttgaagaatttttcgtgtctctatctccttcagttttgctctgatcttaattatttcttgtcttctgtcagcttttaaatttgtttgctcttgcatctctagctcttttagttgtaatgttagggtgttgatttgagatctttctagcttttcaatgtaagcatttagtgctatatatttaccccttaacactgctgtagctgcatcccagagattctagtacattgtctttttgttctcattgacttcaaagaacttcttgatttctgccttaatttcatcatttacccagaagtcattcagaagcaggttgtccaatttccatgtagttgtgtggttttgagtgagtttcttaatcttgagttttaatttgattgtactgtggtctgagagacagtatgatataattgtagttctttcgcatttgctgaagagtgttttacttccaattatatgatcaattttagagtaagttccatgtggcactgagaagaatgtatattctgttgttttggggtggagagttctgtaaatatctatcagtttcacttggtccggagctgagttcccgtactgaatatattttttgttgttgtttttttttgttttgagatggagccttgctctgtcacccaggctggagtgcagtggtgcaatcttggctcactgcaacctccacttccaggattcaagcaattctcctgcctgagccttctgagtagctgggattacaggtgcacgccactatgcctggctaatttttgtatttttagtagagacggggtttcaccatgttggtcaggctggtcttgaactcctgacctcgtgatccacctgccttggcctctcaaagtgctgggattacaggtgtgagccaccacgcccgtcccctgaatatctttattaattttctttctcattgatcggtctaatattgatagtggtgtggtaatgtctcccagtattattgtgtggaagtctaagtttttttgtaggtctccaagaaattgttttatgaatctgggtactccagtattgagtgcatatatatttaggatagttaggacttcttgttgaattgattcctttaccattatgtaatgcccttctttgctttttttgatctttgttggtttaaagcctgttttgtaggaaactaggattgcaatcactgctttttttctgctttccatttgcttggtaaatttttcttcatcttttttattttgagcataagtgtgtctttgcatgtgaaacgagtctaggccttgtggtgatgaattctctcagcatttgcttgtctgaaaaggatttcattactcctttgcgtatgaggcttagtttggctggataaaaattctgggttgaaaattattttattccagaatgttgaatattggcccccactttcttctgcttgtagcgtttctgctgagagatctgcttttagtctgatgggcttccctttgtaaatgacctgacctttctctctggctgcccttaacatttctttcttcatttcaaccttggagaatctgacgattatgtgtcttggggttgatcttctcataaagtatcttactgaggttctctgtattttctgaatttgaatgttggcctgtcttgctaggttggggaatttctcctggatgacctcctgaagtgtgttttccaacttggtttcattctccctgtctctttcaggaactccaatcagtcataggtttggtttttttttttcttttgtagatggagtttcactcttgttgcccaggctggagtgcaatagcgcaatctcagctcactgcagcctctgcctcccgggttcaagtgattctcctgcctcagcctcccaagtagctgggactacaggcgtgtatcaccatacccagctattttttttttttggatttttagtagagacagggtttcaccatgttggtcaggctggtctcgaactcccaaccttaggtgatctacccgcctcggcctcccaaagtgctggtattacaggcatgagccactgcgcccagccggtttggtctttttacatagtcccacagttctcaaaggttttgttcattactttttattcttttttctctaatcttgtctgcctgccttatttcagcaagatagtctttaagctctgatattctttcttctgcttgattgctttggctactgatacctgtgtatgcttcacaaatttctcatgctgtgttttcagctccattaggttatttatgtttctctctaaactggttattgtagttagcaactcctgtaatcttttaccatggttcttagcttctttgcattgggttagaacatgcttctttacctccttgaagtttgttattacccaccttctgaagcctacttctgtcaattcatcaatctttttctctattcagatttgtgccctttctggagaggtgttgtgatcatttggagaagaggcactttggccttttgtgtgttcagcattttttggttgattctttctcatcttcatgagtttgtctggttttgatctttgaggctgctgacccttggatgaagtttttgtcaggactttttttgttgatgttgttgctgttaccttctgtttgtttttctttcaatagtcaggttcctcttctgtaaggctgctgtggcttgttgggggttcacttcaggcctatttatccaggtcactcctgcatctggagatgcccacagaggaggctggagaacagcaaagataggtgcctcctccttcctttgggatttctgatctcgagggacagtgacctaatgtctgtaggaacactcctgtataaagtatctggagattcctattgggggtctcacacagttgagagcatgggaaccaggaaccatttaaggaagaattttggctgtcccttggtggagggggtgtgccgtgctggagggaaacccatttgtctgggctgcctggattctgcagagctagcaagaggaaagactaagtttgctggtcattggaggctatggcaacttttccccctagggggtcagaaccaggaagatcagggttctgttcctgagctcctagctggatttgttggagcttctgcagggaggccccactcagtgagaagggatggatcagggtctggcctaaagaggcagtctggccattgtctgcaaattgggaccaagttgtctagcctccctgactccaacagggaagtagcatggcctggagctatagtgatggctgccaccctcccctacaccccaggggcttagtgcctttggtagttagcagctgcagggatagctgctgcccctccaccagggagttcagatggcttagactgcaggcagccacagtatgtagcccagtctggtctcaaactcctgggcttatataatcctcccaccttagcctcccaaaatgctggaattacaggcatgagccatcacatccacagtgaggttttattttttatatcaaaatataaaaaagagcattgacattcattaatagaatccaagagaatattatgcaaatttaaaaagtaatttcaaaagcaaatactaaaatcgaaagcaaattaaaataaataaaaaataactaaatattgtatagataatatgaccagaaagagaaacatttaattttcacgactttgaagtgaagtttaccaatgggatatttttagtggagaagattctatttccataagaaattcaaaatgagataatttccaggttttaaaaactgatgcaaaacatataaatatagaaagcctctaaggtatgtagtactacttgacatgaaaactgggcaaactcagcaaaaggaaatttttttttttgagatggagttttgctctcgtctcccaggctggagtgcagtggagtgatcttggctcactgcaacttccgcctcccgggttcaagcaattctcctgcctcagcctcccaagtagctaggattacaggtgcccgccaccacgcccagctaattttttgtatttttagtagagatgggatttcaccgtgttagccaggatggtctcaaactcctgacctcaggttatccgcctgcctcagcctcccaaagtgctgggattacaggcatgagtcaccacgcccggcagcaaaaagaaatttaaaattaatctcaagtgtcagaatagatacagaagttctaataatataatattaaatggaatccagagttttattaaaaaataatatgttgtatatttatgtattgtgttattaaactgtaaatgttattaaaaatagaaaatctttttttatttaattatgtaaaaggttaaaaagtgagcagggcatggtggctcacacctgtaatcccagcactttgggaggctgaggcaggcggatcacctgaggtcaagagttcaagatcagcttggccaacattgtgaaacccagtctctactaaaaatacaaaattagctgggcatggtggtgcatgcctgtaatcacagctcctcgggaggctgaggcaggagaatcacttgaacccgggaggcagaggttgcagtgagccgagatcatgccattgcactccagcgtgggtgacaagagcaagactgtctccaaaaaaaaaaaaaaaaaagtggctgggcaaggtggctcacgcctgtaatcccagcactttgggaggccaaagcgggcggatcttgaggtcaggagatcgagaccatcctggctaacacggcgaaacccagtctctactaaaaatacaaaaaattagcctggcatggcggcgtgtgcctgtagtcccagctgctggggaggctgaggcaggagaatggcgtgaacctgggaggcggagcttgcagtgagccgagattgcggcactgcactccagcctgggttgtggcactgcactccagcctgggtgacagagcgagactccatctcaaaaaaaaaaaaaaaaaaaaaagtggccattctcagtaattttgaaagcagcattgtctaaacagatgtgaatttgcatctacatttatctacacatagatttacatagtatctgtctatgtgttcttcatccatccatttatagaatgtataaaaaggatggatttaaaatagagtgatttaaaaaagcatttgaaatgtattatcacagttaattacattgtctagatatttatatgttcactcacaaaatataaaatgagattattttatcaacccttccagataatttttttcatttattttatttattatttttttttgagatggagtctcgctctgtcgcccaggctggagtgcagtggtgggatctcggctcactgcaagctccgcctcccaggttcatgccattctcgggcctcagcctcccaagtagctgggactacaggcgcccaccaccacgcccggctaccagataatttaataaaatattttaaaactatgtgactaatattattagctgaaaataggaaagaatatatttatttgcacaaataataaaaatgctaaactaaatgtaaaatataaaaatatccctgaaaaaggcaaataatgtacactatttaaaaaataactgtgctacaagagttatgcagcatacaggaatcatacataaatatcaactatttatatctattttttgagacaggatctcaatgtatcacccaggctggaattctgtggttgatggtgccatgagtaaccacaccttacctaactatagacattttaaataatttcagtgtgaaatactaaacataattcaaaatatattttccttatatgtaatgaggcaaacagtttcaagatctaaatgatgagtgaaaaagaattccaacaacctgcggcatgataatgcaaatagctcacgtgtacagcgctctcactgtgccagcccatgtttagaagcatattagatatttttgcgcattaaattatcatcagaaataactctttcaggtaagtttaattattccccatgtcgcagacaaggtgactgaatggaaaaatattcagggacttatccaaggtcacccagatagggagtgggtgagctaaggtgtgctctgacctcctctctgcttccctggcacagacagtcccattgttcattgattaaacagctctcattgagcacctgccatgggccgagcactgtgcctggtactgggaacatagtggtgaactagacacaactcccaggagcaaacactaaagaagtaaacaacaaacagcaagattattgcagagaatgacaagttgctaagacatgctgctgctgtaaaagatggacgtgcatagggctattgggggtgggttctagttggagggaggagggtggagcaaacctccccaaggaagagctgagcccagcctggaggctcctgtcagtgtgaggatgtggttagagtctgtctcagtttctttccatgcagcccctaaaatctttggaatgtctgaaatgagaagtgtcttttccatgtaggcactgatcctcacatacattagagaacagaactcttgctgtgcccacggccagggaaaggggaacaatatctctctaccttgtggatcctagagcaccttgtcctgccaggacgctcaccctcacccccacaaggtacagatggcaaccagggtgccgcataccacccactggctcgcccaaaggatgctgagtcctgtagggaccgtgggcctgaataatgtttcctagtcatagagtctttctgattttctcactcactagccctgtgcctcagtttccctcactgtggcacaaaatcaacatcccattccgcaggctaggtgacccagagaggtcaccacagcccattaaatgactatagcatgtgaaagtgggaagtgagagtccctccctgctctgggtcttttgccccaggacagatgtttatcaggccagctgcctggggagggccacacctcctgacttgggaacattgtttccaaattgaggtcactacagttaaggactcccaatgcattggggtaggcacaggggtgggatggggtaaagcaacatcgcattacaagagccttggatcgaccctggagagcgagaatcaaatttagactcctgtctgaagctgaccaccctgaataattaggatttggggatacgacaaggctcttggttcaggaaacaagatcttctggttctggactctgtagctgtcctggggacttgtttccaactatgtgctttaattgaacctaaggggatggggcactcggaaggaactcttaagccaagggtgagaggcctgccttctgcctcccaaactccctccccagtggtggacattgggcggcaaaatttctttacaaagaaaaaaaaaatatccagagaccaggaaggctaataaatgcttaccaggattatccagcctaatcatcacaacagtcctgccatattcgtcctctgggacaggtgaggaaactgaggttggaggaggacaccgggagcctggtcgggccactggaagcctggagccccagagttcccggcattcaccgccctccaaccccctctctccctcccggccccgggaagcttcattcccagctcattcacttgtcaatcactcagactcgctgggcctccagccctccctgaagccctcgcactcatcaggtgacggcctccctctgtgtggctgccaggctggggatgggggtgtctgtgcttcccttgcccaagccgagagtggcctgttcccagggggcaggcttcctccttggttggcagccaggagtctggagcgcaggtgccgggcaggcagcactgggagcgctcggcgacttagctggaggcctaaggagccacccctcacggaccagagcgcctttgcaaggtgggctcgccgcacactctgctcctcttctgtggccccggggcccctcctagaacaccctcctcatctcgggggaccttgaccgccagcagccccacacctgctacctctgcctggcgttgggtgcgcacctctagggacagatggatcccttagcccagcgggcttgacagcagggtgggggcagtgggggctccagagagtgtcaccgccttatgctggccaccgccgggcaggggctgggctcagctgacaccctacatccgccctccagattccagtgtctgacttcggcgaatctggaccggacgcgtggtctggggcctggactgtggacgcccatgggccgggctccccgcggggacctcgcacttgggtggggaccctgcggctccaggcgccacacacatcagtgcgcccgctctggctgtgaatttcggggaggggcggcagcagagcacgtgggctggctgggtggggacgatcacccgccagcgccttttcccacccgggcgccctttccagtccccgcgtcgcctgcagggccgcccctcctccgcccgctggttcctccccactcgccgctctccagccccgcgcggctctgtggcccgggctccaaggcgggggccgcccacgacggccaccggcagggacagcgggggcaaatttcccagagcggtaagccggccccagccagccccacggcagggatggcttcgaatccgagcccccgacaccccggccccgtccgcccagcccgcaccctgcgtggctcgctgcccgcccgtcccgcacccgctcggtcactcgggctggggccccctgcagggtgggcgcgacccagcgccgccgcacggagcctgaacccaaaccccaaacccggaccgcaggatccccgccctctaggaaccaggacgggccctcctagcgggtatttggggacctgggtgtgtatctgtggaaacaattggtcaaaagtggctttttgttttcccaaaggtaaaggctcctttgtaattatgtattttcttcttatttacttaaaactgatagaatctcatcatttagatgaatccataattgtgtcagtgaatttgagtacactttttaaagtttttctcagtttaattagtccttttttttgtttctagtttaagaagaattttaaattctacctaaaattagtaaagtgaactccaaaatatctgagataggtctcaatttagaaaatttattttgccaagattaagggcacacctgtgacacagcctcaggaggtggtgacaatgcgtgcccaaggtgattggggcacagcttgattttatgcttttttttttttttgagacggagtttcgcccttgttgcccaggctggagcgcagtggtgcaatctctgctcaccgcaacatttgcctcccgggttcaagcaattctcctgcctcagcctcctgggtagctgggactacaggcgcccgccaccacgcccagctaattttttgtatttttagtagagacagggtttcaccgtgttagccaggagggtctcgatctcctgacctcgtgatccgcctgcctcggcctcccaaagtgctgggattacaggcgtgagccaccgtgcccagccctgattttatacattttaggagacaggaaacatcaatcaatatatggaagatgtacatcgtccaagaaggtgggagaactcgaagcagggcaggagcttccaggtcataggtagataaaggactaatggttggttgcaatttttctgagattctgattagccttttacaggggtatttccaggtctgtctctcctaagcttgcccaagagaaacttgacaccaaggttgtataattttaatctgtttttgccaaatttttgtctatttcataacttacaataacaggtaatttaaccaaaacccttatggttttctagcacaattatattataagctacatatgtattcttagcaaggtaaaagcaatagaaatgatgatgataaaataacaacttttctgtgcatgaatagcccttcagctggtgacatcacacagcccactgttgaggttccgagtcctacacccacatgcaatcaaaagatggaaaatcgacttgcacacatggatctggtttacaggctggttgttgactctcacaccgtgattcagcaaacctgtaaggctgtgactttactaagaagacaaagtttgcaggaggaatagaggctttgatgcagtccactgctgagattgtgacttatgtacttagactcaacattcaggaggtgttgactcttatacctagaactgggacatgtgtgaaattattattattttccttttttttttgagatggagtcttgctctgtcaaccaggctggagtacagtggcgtgatcttggctcacttcaatcttcacctcctgggttcaagtgattctcctttctcagcctccacagtaactgggattacaggcatgcatcacaacgtccagctaatttttgtatttttagtggagacaaggtttcatcatgttggccaggctggtcttgaactcttgacctcaggtgatctgcctgcctcagcctcccaaagtgctgggattacgggtgtgagccactgcgcttggccatgtgtggaattattagtctcacccctggatcttattgcagatgttattgtgacatatgcctctcccagcacctgagtgatttgactctcttgtgaggtcttagctgacagattggattgtggcatatcacctaggtgatatgacactattcgcctgccttggcactacctacttggggctttgtgacatatgtctgtgctcataactaagatgatgtgattctcttctcttacctggtctctgctcacatgggagataatgacatattgctgggaccaataccaaagtgacattactcttttaccttgaccttcttctcagaaaacattgggacatattgttgggcccaccaccaacatgatgtgagtcttctgtgtggtctctgaccacagagatcatcgtgacatatctctgaaagttcaaaactatttgaagcgattatcttgttatgcctgctctttgcccataggagagaatgtaacatttctgtgggcccagcacctagttgatataagtgtgcctggcccatgcctacaaaagaaagactgacttatccatgggtccagcacacaggtgattccattctactgccttgattattgcccacaagaatcactgttacatatttttgggctctcctcctaggtgatgtgagactcttttccttccctggtcccatccacaaaggagattgtgacatatcacttgacccagcacctacgtgatctgtctctcatctgatgccttggcccttcccactgggctgatcatgacatatagctgggcacagctactaggttatgtgactcttctcttcctgagtcctgcccacagggagcattgtgacctatctctaaacacttcacctagataatgggactctttcatctgggccctccccaaagaggctattgtgacatgtttggatcaagcacctaggaaatattactgttctctcctacctgttacctgttactggtagtgaatccgtatgggtacaggtctgcagcaacctcaattcttgcctcctcagaagaaaaaaactcaactgaggggcataaggcagaaggagagaccaaggcaagtaatagagcaggagtgaaagtttattagaacaggaacaaaaggaaaaaatgtacacttggaagaggaccaagtggatgacttaaaaggcaagtgcacagtttgacctttggagctggggttttgtatgttggcatacttctggagtcttgaattacttctccccattcacccaactcctgagatcttattgggaagctgctgatcaccagtttcagctgttttctatctattaagagactgcctttcactagtgccagctgtgctgtaaccaattattactttagagggacagctaacaactgcctcacctgaccatcacctgatcattgactgactctcctggtgtgtgtgtggggccctcacttgccctgttcatacctgactagctacctactgtaacgctgcatgcattgtgtattgtgacatataacagggcccaatatctaggtgaggtgactctactgcaagggccctgcccaacaggggtattatgatatatttttacattcacgatttaggcgatttgcctttctctttctgccagacccctgccaaaatatggatggtgacatatcactgggcctaatgcctaggtaatgtgacttctgtcttttgaatgggccccacatattctgagtaccatgacatatcactgggccaaacatctagaagatgggaggtgccgacctgtgtactgtaaacagaactttagccctaccactctcaagagcctcgtgacatatctctgcatttgtcacctaggagatgtgactctcccctgctgccttcaccctgctcacagggaaggttgtgatataacattgacccagcaacaggatgatgtgtttccttttcctaggccttgctcacagggaccattgtgacatatcactgggcccagcacccaggtgctgtgactctgctgcctgtgccctgcctgtgtcctgctttcagaataggattgtaacatagacctggctgagtacccaggtgatgtgactcttctctctggttcctgccgtcagagaagattgcgatatatccctggcctagcatcaaaatgatgtgactctcctgtcactctctatccacaggtaggattgtgaagtatatcttcgttcaactcatcagtgagatagtaactttcatacctcaaaccaaccaataggagagacactatcttttgaagctaggctttgggaaatagataagatcccatttctcctctctgtatgaagatcacagtggatgtctgctgtcttatatatcacatcagcccctcatgtgttacagagggtgtcatcacagggcccagcacacaggtgacatggcatttcttattttttgagacggagtccctctctgtcccccaggctggagtgcagtggcacaatattggtgctcactacaacctccgcctcccggattcaagcagttctcttgtctcagccttcccaatagctgagactacaggtgcccgccaccacgcttggctaattttttgtatttttagtagagacggagtttcaccgtgttagccagaatggtctcgatccctgacctcgtgatccacctgcctcagcctcctaaagtgctgggattacaggtgtgagccacctcacccggccaacatgacatttcttgtgtgcacaccctgtcatccatcaggattgtcaccctcacgcatgaacagagcctactggtaaggtcttgaatttcacacgtgaatgcagtctacagttgaaattgtgattgtcatatgtgaacatccagctgcaattggcatggtgattttcaacctagctcctaggcaggtgaggactcttttatctggaaccagcccattatagagatgttgactctcacaactgagcttagttccacaggtacaatcatgggtccataccatcatgaaggtcatagagcagtttgtaactctcactaatactgcagaaagctctcgggtggtactgggtcttaaagaacctagcgcacaggtgagattgtgacactcatatgcaaacccagtcaacagtaaaaattgtcctcttttgacatgaacacagcccactgttgaggtcccaagtctccctcatgaaaacagtttaaaggtacgaaattgactcttatatgtagattcagttcacaggtgggttggtgatgctcagaccaatattcagcacacctgtgagtctgtgactccagtaagcatccacagtctgtaggagaaactgaggccctcgtaaacgaatcaagtgcaccattgagactgtgactcttgtacttagactcaacatatagaaggtgttttttttgtttgtttgtttgtttttgttttgttttgtttttgtgacagagtctcactttgtcacccaggctggagtacggtgtcatgatcttggctgactgcaacctccacctcctgggttcaagcgattctcttgcctcagcctcccaagtagctgggattacaggcacccgccaccatgcctggctaatttttgtatttttagtagagacggagtttcaccatgttggccagactggtggaggtgttgactctcaaatttagaaatgggacatgtgtaagattgttaatctaatctccaaattgtcttgcaggtgttattgtgacatatgtctctgcttagtacttgagtgatttgactctcctgcctgggcccagtccatagatgcaagtgtgacatatggcagaacccagcacttaggagttgtgactccatactcctgcctttgtgctgcccctagggttggaggggggaggattgcaacttatcactgggccttgcatccaagtaatgtaagtctttcttttcttggcaatgcctacaggggacactgatatattcctgggtcccaaacccagtttatgttattctcctatttgttccctgctcacatggcccatttctactaaaaatacaaaaattagtcaggcattgtggcgggtgtctgtaatcacagctgcttgggaggctgaggcaggagaattgcttgaatccaggaggtgggtgttgcagtgagccaagattgagccactgcactcccgcctggatgacagagtgagactccgtctcaaaaacaaacaaacaaacaaaaaaactgactatcatatgtgagcatctggtcaaatttggggtagcaaaacttttttgtttttttttttgagatggagtgttgctctgttgctcatgctggagtgcagtggcttgatcttggctcaccacaacctccagctcccaggttcaagcgattctcctacctcagccacccgagtagctgggactacaggcgtgtgccaccaagcccggctaatttttgtatttttagtagagatggggtttcactatgttggccagtctggtcttgtgatcttatgatcttatgatccgcccacctcggcctcccaaagtgctgggattataggtgtaagccaccacgcccggccagcaaaacatttttaaatgaagctcataggaagatgaaggctcttgtatctggattcagaaaattgaaaagatgttgactcatatctgggcttaattaccttagatgcactcataggtttataccagcatgaaagtctcagactcgattgtaactctcattcaaactgtataaagccctaggatagtacaaagagtgacgtaatagggccaagcacacaggtgagattatcacactcatgtgcacaccctgccaacagtaaagactgtcattctcccatatgaacatggcccactgttgagactttgaacctcacacacaaagacagctgaaagttggaaaattgaattacatatgtggttctggtccacagatgttttgttgactctcaaagcaagattcaggacacctgtgagcctctgactccactaggggaacacaattcacaggagagattgaggctttcaaatacagatccagaccacctttgagatggtgactcatgtaattagacacaacatacagcaggtattgactctcatacctagaaccaggacatgtgtgggattcttaatctcatccctagaccttcttgcacatgtgattgtgacatatgcctcttcccagcacctgagtgatttaacctttctgcctgggccctacagatggaattgtggcatatcactgaactcatacctaggtgacgtgagcctatacttttgccttagcacttttcacagacagcatagtgacatatcactggccctagaacccaggtgaagtgactttcctctattgcttggtctctgcccaagaacagattgtgatatgtcactgggcctatcacctaggtgatatgatttttctctcctacctggacccaacactttcataatgcaaatctcctgcttgggctcgcctacagaggtattataatatatctgttcatttatcacctaggggatgtgactctccttttctgcctgaaccctgctgaaagggagaattctgacatatcactgggcccagaatctaggttatgctacttttctgtttttcctgggccccacatattttaggtattgttacatattgctaggtgtcattcctttgggctgggatgctctggcttgcccacaaggggccttgtaaaatatttctgtatctgacacctaagatatgtgagtttcctcttttgcctgcatcctgtccacagaaaatgttgtgatatatcactggacccaggcaccaggtgatgtgtctgtcctgccaaggctgtgcccagagggagcattgtgacatatcactgagttcagcacccaggtgatatggctttgctgcctgtgctctgctttcaggaggggattgtactatatctgtggctgagtacctaggtgatatgactcccgcgtggtttctgccctcagggaagattttgacatacccttgccaaaaacctacttgatgtgactttcctggttgctccctagccacaggtagaattgtgacatatattttggccagctaccaggtgcattggttacctcatacctcaaaccagctaatagaagagacactacctccgatagctagacttaggaaaatgagtaagatcatgggtctcctctttgtgtaaaggccataaaggattactgttcttttacatatcatataaagcccttgaggggtacagaaaatgtcatcacagggcacaataaaagtgagattgtgtttcttgtatgtgaatcccatcaactgttaagactgtcaccctgacacaaggacagagcccattggagaggtcctgaatttcacacgttgacacagcccacagttcagattgtgactgtcatatgtgaacacccagctacaattgggatggtgatgtatttctaattctggcaggttaaatctcttctatctggacatatccaactggagagatgttgactctcattactgggcttggggccacaggaaggatcatgggtctatatgagcacaaatgtctcagagcatattgtgactttaatgtatattgtagaaagccctttggtggtacagagggtgtcctaacagagcacagcacgcaggtgagattgtgacactcatatatacaccaagctgacagtaaatattgtcattcttctggataaacacaggccactgtttaggttctggatctcacacccaaagtaagttgaaattgaaaaattgatgcataaatggattcagttcacagatgggttggtgactctcagaccaagatccagcatatctatgaggcattgacttcactaaagggacactgtctgcaggagggattaaggcttttatgaacagattcagtaaactgttgagattgtgggttataaacttagacccaacatacaggaggtggcgcctcttatacctaaaaccaagaagtgcaggattgttaatctcttctctggaccttcctgcagctgtgattgtgacgtatacctcagcctagcacttgagcagatttactgtcctgcctgggctcagcccacagattggatagtgacatcttgctgcatccagcatttagtcaatgcgaatctacactcttgtcttggttctgaccatagagagaattttgacatatcactgctccttgcacataggctatgtgactgtcctgcctgtgttttgcccacatgggccattgtaacatattgctgagtccagcacccaggtgatatgatcctccagcctttcctctgcctacacaagatagtgtgacatatctttgggtccctcacatgggtgatgtgactctcctgcctcacccttgtttcaagggatattgtgacataactgctgtaaccagcacctaggtgatgcggctattttccactgcttgggctgtgcccaatgaggaattgtgaagtgtctctctgcccagtacctaggtaatttgactctcctctttttcctgggcactgcatacattgcgtatttgaaaatatggctgaatccaacagctaggtgatgcaactatcttacaaaggccctgcctagagatgtattacgatgcattttttatttattacttaggtgatgtgactatcttcttctgccttggccctgcctaatttgagaattgtgaaatatcactggacccggcacctaagttatgtaattctcttctattgcctgggccctacatattttgggtattgtgacatatcactgcaccaaacaccaaagagataagaagctcctgcctaggctatgcctacagcagcccttgtgacatatttctgaattcattatgtatgagatgtgactctcctcttccgcttgcactctttctatagaaagattatgacatatcactgggcccagcaattaggtgaggtgtctgtcctgcttggaccttgcccactgggagcactgtgacatattgctgggcccagcactgaggtgatgtgactcctttctggaccctgcctttaggaagaattgtgacatatcgctagcccaaaaccaaagtgatgaaactttcttgcttactctataaccacaggtaggattgtgacatgtatctttgcccagctcataggtatgattatgattgatacgttgaattagccaatagaagaaatgctatctctcacagaaaggcttaagggaaatgaataaatccttaggtctcttctttatacaaaggttgtaggtgagtaccactgtctcacatgtcatataacgcctttgggtggcatacagtgtcatcacagggcccagcacacaggtgagattgtgtttttcatgtgcacactgtgccaaccattaggattgatactctcatgaataaacagagcacacttctgaggttctgaatctcacactcagatgcagttcaaagttggaactgtgacggtcatatgtaaatatccagccacagttgagatggttattcatttctaaacctagctaataggcaggggagaactcttctatgtaaacccagttacttggagagatgatgactctcatacctgggcttaatttcacaggtacagtcattggtccatagcagcataaaggtctcagagtggaatgccactcttaggtatatcatataaattcatcaggtggtacacagattgctctaacaaggcccagcacgcaggtgaaattgtgacacacatattcacacacagatgacactaaaaattgtcatccttccacatgaatacagccctcagttgaggttctaaacctcacacccagaagaactcacaaattgaataattgactctcatacatggatccagtccacaggtgtgttgatgactaagaccaagatagacacaccttagaggctgcaacttcaccaaggggacacagtttgcaggagggattgagtctcccatgcaagggtccagtctacaattgagattgtgactcatgtacttttatctgacatacaggagatgttgattctcatatctaaatccaggacatttgggagactgttagtcatatctatggactttcttgcaggtgtaattgtggcatatgtttctgcccagtacctgagtgattttactttcctgtatgacccaagcccacagatgtgattgttacataccagtggacccagcacctaggtgatgcaattatatttttctcccttggtgctgtttgcagtggggctttgtgatgtatcactgaacccagcacccaggttatgagactcttctgcctgtgccctgcccagatatgccattgtgctatattgctgcatccaacactatggtcatgtaacccacttgcctgggctctgcctacagagggaattgtgacatatctctgcacctattactcaggtgatgtgactcttctcctgcatagtccctgctcatcagagggattttgactaattcttaggcccagcacctagctgatatgattcttctttctaggtcctgcctgtaggggagatagtgacatatcactaggctcaacagcaaggtgatgtttttcttctgctttggccctgccctcaaaagtcattgtgatgtattgctgagtccagcaccaaggtgatgcccagttcttgcctgaatcctgcccacaggaggcaatgtgacttatctctgtgtccatcaacaatttgatgtaactttactcttttgcctgggcttttagcataggagagattgtgatatatctccatgacctaggttacatgactgtcctcttctgcctgggccatgcccacaaaagggagagtgacttttcactgggcccagcacataggtgatgtaattcttcctcctggtcactgctcacagggtttattatgacatatctttaggcccatcacctaggtgatatgactatagttttcttcctaggaccttttgacaggactgtgatatgtcacttggcccagcacctatgtgatgtgactgctctcataactgacccctgccatctagggtgattttgacatacagctgatcccagtttttaaattatggcactcttttttactttgtgagtcctgaccacagaaagcattgcaacatatctcttggcctctgacgtacaatatgtaactatcctgcctaaaacctattttcagggggtgttgtaacatattgctgaacccaccatctaggtgatgtgactgtcccatactggatgggctctgagcaaaatgggactgtgatgtatcactagggtcagcacctaagtgaagtgattctcctctttttcccaggccctgcatacattgtgtattgtgacatatgtgtgggtcaaacacctaggtgatttgactcttctgcctggagctttcatacagcatactatgacatgtcttttcatttattacctgtgttatgtgactctccttttctgcctgggccatgccaaaaggggggattgtaacatatcactggaccaagcacccaggtgatgtgactctcctattttatccagcccccacatatttttagtattctgatacatggctgggcccaacacctaggggttggaaatctcctttctctgccatgctcacagtggacctcatgacatatctctgcacgtgtcacttaaaagatgtgacccttttctgcctgcacgctgcccataggaaaaattgtgaaatactcatgggcccccaaaccaggtggtgtgtctctcctgcctaggccttgttcacagggagaattgtgacatatcactggactcagcacccaagtgatttgactctgctgcctgtgccctgctttcattagaggatattcacatatccctggcagaaaaccagatgatgtgactcttcttccgggtcccttctctcagagaatattataatatattcctgactcaagacccaggtaatgtgactctcctgcttccttcctatccacaggtgggattgtgacatatgtctttgttcagatcatagatgcaataatgactctaatacctcaaaccatccaataagagatatactgtctcttctagctaggtttagagaaacaggtaagatcctgggtctcctgtttgcataaaaataatatcaaattaccactctcttgcttatggtataaagcagtttgatgggacagaaagtgtcatcatatggtccagcacggcacacacgtgatacggtgtttctcatatgcacaccctgtgaaccattagaactgtcacccttacatatgaacagagcccacttttgagaacacaggtaaaactgtgactctcctatgcacactcagccaacagtaaacattgtcaccctcctaaatggaaaccatccactgttgaggctgtgaatctcccacgtggaggtagtcaaaagttggaattgtgactctcatacatggatcttgtccataggtagaatggtaactcaatgaacaggattcagcacagctgtgaggctgtgattcagatattgagactcagtttgcatttgaaattgtgtcttcacgcaggaatacagtccaccattaagacggtgactcatgtacttggaccaaacataaagaaggtcttgactttcatacctggagccagaaaatgtatggaattttgaatctcatttctggacctgcttgcaggcgtgattgtgacatataccttggtccagcacctgagtgatttgactatcctgcctgggtaaagcctcaaaatggaattgtgacacatgcctggtgcaagcatctaaggtattttactctcctgcgtagaccctgtcctcagggagaattgtgacatcctgctggacccatcgcctaggttatatattctctcctgcctgggccctttacacagggtggattgtgacatattgctgtgtcctgcatgcagataatgtgactttcctgcctgaaccctgcccacagaaggcactgtgaaatactcctgggcccagtacccaggttatgtgactttactgccacagccctgcccacagagtggacattgacgtatttttggtccagcattcaggtgatctgaatctcttgcctgctccattcacacagcttaaatttagacatatgtattttcaagctcttagacattatagtcaagcttatatgggaacccagccaataagagtaattttgactctcttagctagattttggacagtgggtagagtcctggatcacctacgtttagaaaggtcacagaggtttataaaatttatgcataattggccaggtgcagtggctcatgcctgtaatcccagtcctctggggggccaaggcgggtggatcacctgaggtcaggagttcaagaccagcctgcccaatatggtgaaaccccatctctactaaaaatacaaaaaattagccagttgtggtggtgtgcgtctgtaatcccagctactcaggaggctgaggcaggagaatcacttgaacccgggtggcagaggttgcagtgagctgatatcatgccatcgtactccagtctgggtgacaagagcgagactccatctcaaaaaaaattatgcatactttagaaatactttgtgtgctacagagaatgtaataatagggtctaccacacaggtaagattgtgacttctcacaggcataccaagccaacaattaggattgtcacttccaaacatgaaagaagcacactggtgatgtcctgaacctcacatgcagatgcagttcacagttaaaattctgactgtcatatgtaaatctgggaacaggttgaatagtgactgatttctggacccagctcagaggcacagtgattagttgcattacctggacctagccaataggagatatgttgactcttataggtagccttcaagcaatgggcaaggtcctgggctttctacttgtatgaaggtcacagaagattgtaaaactcatgcatgttgtatgatcccttccaatggtacagagagtgtcataacagtttccagcacacagttaaaattgtgattctcagctgggggcagtggcgcatgcctgtaattccatcagtttgggaggccgaggcaggcggatcacgaggtcaggagatcaagaccatcctggctaacatggtgaaacgctgtcactactaaaaatacaaaaaattagctgggtgtggtggtgggtgcctgtagtcccagctactcaggaggctgaggcaggagaattgcgtgaacctgggaggcaaagcttgcagtgagctgagatcgcgccactgcactccagcctggacaacagagtgagactccatctcaaaaaagaaaaaaattgtgattctcataggcataccctgccaacaatgagggctgtcattctcacaaatggaaaaagacttctggtttggtcctaaatatcacatgtggatgcagtccacagttgaaattgtgactgttatatttggatctggccacaggtaaaatggtgactcacttctgtatccaactcacaggcatagtgagaactctcacacctggatctagccaataagagagatgttagctctcattcctgggcttaggacaatgggtaagattatgagtttataccagcacatagatccaagagtgggttgtggctctcaggcataccgtataaagccctcaggtgtcaccaagagtgtggtaacagggcccagtgcacaggtgagatagtgactctggtatgcacgcccagttcacagtaagaattttcaccttcttaaatagccacagtccactgttgaggttctgaatctcaaactcaaaggagctgaaagttagaattgtgactctcatatgaggatcaggtccacagacgagatagtgaatcttggaccaacattcaacacaccggtgaggctgtgactcttctaccaggacacagtctaagaattgaggctgtcatgcacaaatccagtctactattgagattctgactcgcatacttagaccaaacactcagaagatcttgactatgatctctagagctggaagtgtttgggattgtttatctcatccctgaatctttctgcaggtgtgattgtggcatatgtctttgcccataccctgagtgattttagtttcctgcctgagcccagcccatagatggaattgtgacatataccaaggccaagcaccaaggtaatatgactcttctcatctgcctgaacctgtcacttagaagtaattgtgacatatttctgaatccagcacgtgggtgatgtgactctcctcttgtgcctaggccttgcctacaagaaagattgtgtcatatcactgagcccagcacctatgtgatgtacttcttctgccatagttctccccacataagacactgtgacatatttctgggccaattacataagttaaatgagtctttgcttatgcctggatctcaccctcagaagaacttatgacatgttgctggacccagcacctaggtaatttgagtcttctctgctgcctggcccctgccaacagaagggattttaaactattgcttaaactagcacataaattttgtgactcacttcttttgctaagccctgctaaccgtgggaattacaacatattgctgaaaccaggataatgcaacaatcctctcttgcctgggccttgcccacagtgggcattgttacatattactgggcccatcttctaagtaatgtgactgtcctcttctgcttgggacctgcaacatgaaagactgtggaatatcgctaggcccagaacccagttggtgtgactctcttctttcttgatcctgctcatagtgcagattgagatattcctgtcctagcatccaagtgatgtgactcttcttcctggttcctagctacaggtgggattgtgacatatgcctgggacgtggtcactggtacaatgatgacacccacaaacttcaacccacaaaccaggagaaatattgattctgtctgctaggctttgggcaacaggtaaagtcttcgtctgttacttgcatgaaaggtcagagaaaattacaatactcatgcaaattgtataaagctttcagctggtgcagagagtgtcataacaaagcccagcacacaggtgaaattttgactctcaaatgcacacccagccaatagttagaatttttacccacacacatgtttttagcctacagttaaggtcccaaatctcacatgtaaatgctgttcacagttggaattgtgactggtatatgtggatctagccacaggtaggatggtaattaacttctgaacccaactgacaggtgtaatgatgactctaatacctggatgcagcaaattagagagaggttgactctaatacctgtgcttagggcaagggtacaatcatgggtcataacagcacaagagtctcagagcagattgtgactctcaggaatattatacaaagcctttgagtggtacatggaatgtcatagcagtaccaatcacggaggtgacattgtgattcttatatgcacacccacccaaatgtaaaagttgtcaccctcccacagggacactgatcaccttgaggttctgaatctgacactaagaggcaatcgaaagttaaaattgtgactctcatatgtggatcccatccacaggtggggtagtgactcttgagaaagaattcaacatgccggtgagcctgtgactttcataccaggacaccgtccttgggtgggattgggactctcattcacagatccgatatatcattgaaatggtgagtcctgtacttgcacataactcacaggagatgttgactctcataactaaagctgagacatgtgcagaattataaatctaaccacagaagcttcatgaatgtgtgatttttacagacctatttgcctagcatttgagtaattccactcgtctgtgtaggccaagcccttagatggtgttgtgacatgaattgagtcaagaatctaggtgatgtaactttctttcctgggtgctgccctcaaaggagattttgacatattgctgggcccagcacattagtgatgtgattcttttctcctgcctggttcctacacactgggagcattgtggcatatcactgagcccaacacctaggtgatatgactctcctcccatgtctgggccctgcccacattagggatggtgacatatcactgggcccagcacccaggtgaagtgaatatcctctcctgtttggcttctgcatacaggggcatggtgacatactgcagtgcccaacattatgataatgtgattttactgcatgggcagtgttcacaggatggtattgtgacatgtaagtggacccagcacctagataatgtgactctcctctcctgcccaggccctgcttatagagcaaattacgacatattgctgagtctagcacctgggtgatgtgactctcctgccttagccttgctcacaggggacattttgacatatctttgggttcatcacctagatgatgtgactctcttcttctgcctgtgctttacccacaggaaagcttggatcatatcactgggctgagcatccaggtaatctgattctgtttttgagccttgcccactgggggcattgtgacatttcactaggcccagcatttaggtgatgtgactctcttgcctgggtcctgcccataggggaactgtgacatatttctggtccagtgcccaggggatgtgatgctctagcctggtctctgctcccaggtggaattgtgacatatacctatgcccggctaacagggatgaagatgactcttgtacctggactcagctaataggagagattgtaactttcatagccaacattagggcaaccagtaatgtcctgggtttcctaattgtatgaatatcaaaaaggattacatcacttactcatattacataaagcagtcaagtgtacagagagtattataacagggctcagcacagaggtgagattgtgactttcatatgcacacccaggcaacagttataactgtcactctctcacatggacacagcccactggtaaaatcctgaatctgactcatgaacacagttcacagttggaattgtgactatcatatgtggatacagccaccagtcaaatgcggactcgtgtatgaactcagctcacaggaatggtgataactgtcatacctggatccaaccaataagggttcattcacagttttctaatggctctacgaacaacagaaataaaaaaggtatctctttatggggtatacttatatgtagagaattttgctgccaacttatatataaaaaaactttcaccttgataggtaaaagatgaagggctaatgtgagtgagaagttttaaagaaacatttgttgcctcataatatcagaaacagaatattgatccactgcttttaacctacttcataagtcaaaaataacttcttcagaataggttaaagagcattgccagcaggccattactcttctgaatgggcatcatttgttagatcattttttccatggcttagcataaatgaagcaatggttaggaatttatcccccaaaatagggctgtatagcagattctaatgtaaaggctgtggttacacaataggtattaaatgttctaactaaagttgtgctaaataatagaatttcttttgattacttactggataaacagagaactacttgtgtaattgctaatacttgtagttgcacatggtagaatacattgtgtattacagagatgcagttgtaggggattaatgaacaggctgcttggttgaaatgagtagatcattatctagctaattatttaatctattggattttagttggttgttcatggggaccttggctaagaagcatggtttcaactattttttttttttgtttttttgtttgtttgtttgtttgtttgagacaaagtcttgctctgtagctcaggctggagagcagtggcatgatcttggcttaccacaacctccacctcctgggttcaagtgattctcctgcctcagcctccagagtggctgggattataggtacgcattactgcacatggttaatttttagtatttttagtagagacagaatttcaccatgttggccaggctggtcttgaactcctgacctcaggtaatctgcctgcctcggcctcccaaagtgttaggaaacaggccaccgtgcctggcctgtttcaacttttggcattattctcctgctagtcaaaatagtagtctcccaggccgggcgtggtggctcacacctgtaatcctagcactttgggaggttgaggtgggtggatcacctgaggtcgtgagttcgagaccagcctgaccaaaatggagaaaccccatctctactaaaaatacaaaaataaaattagctgggtgtggtggcacatgcctgtaatctcagctactcaggaggctgaggcaggagaatcacttgaacccgggaggcggatgttgcagtgagctgagattgtgactttgcactccagccagggcaacaagagtgaaactccatctaaaaaaaataaatgaataaaattgtagtatccctactgcaccgtattctctcaaaaattataaatgtttgcatgcagtcatctctagaatgttaaatagtctcttgttgactggcctgacagaaactcaaagacatatgtgactatgaagacaccataacctgtgaataacattataaggacaaaaacccgaaataatggaaattgagagtgccactaaggcctagagttttggtcacactctgacctacgtaagaacttcaccaaaaagccagggttttaaaaaacaaagttggcggggggtggtggctcacgtctgtaatcccagaactttgggacgccggggcgggcagatcacaaggtcaggagatggagaccatcatggccaacaaggtgaaaccccatgtctactaaaaatacaaaaattagctgggtttggtggcgcgtgcctgtaatcccagctactcagggggctgtggcaagagaatcgcttgaacccaggaggcagaggttgctgtgagctgagattgtgctattccactccagcctggtgacagagcgagactccctctcaaaaaaacaaaacaaaacaaagttattggaggccatcgttctaaactgagcttgtacactagttccaaacagaccaaaccaaaccaaaatgagtcacctgtgctaaatgtgacataatccaactgaaaattgaagaaaataggtagatcctaaaacaggccaggtttatatttttcttctggaaacagcagatttcaacacaaggaagccccttctaatcctttaaaaaataaataataggccagacacggtggctcacacctgtaatactaacactttgggaggctgaggtgggtggatcacttgaggtcaggagttcaagaccagtctggccaacatggtgaaactccatcgctactaaaaatacaaaaattagccaggcatggtggcaggcacctgtaatcacagctacttgggaggctaaggcaggagaatcgtttgaacctgggaggaggaggttgcagtgagctgagattgcgcccttgcactccagcctgggtgacagagtgaaacttcatctcagtaataaacaaacaaacaaacataataaaataaccggaagcccatgtttctacttaaaaaaaaaaaaaacacagttctgctattttacagtaggatttgacactacgtaagtactcttttttttttttttgagatgccgtcttgctctgtggcccagactggagtgcagcggcgagatttccgtgcactacaacatctgcctcctgggttcaagtgattatcctgcctcagcttctggcgtagctgggattacaggcacctgctatcatgcccggctaatttttgtatttttgtagagacagagttttaccatgttggccaggctggtcttgaactcctgacctcaggtgatctgtctgcctcggccttccaaagtgctgggattacaggcgtgaacaaccacgcccggccaataagtacatttttgatgacaacagagtgatatcaatatctaaagttttgatatatctctcaaaattgagaagatgaccaaaagggagaaattgttaaattaattatattctaatgctgccactttcatgtttaatttttttgataggttttttttcatactaaactgaaacctaacttgataaataaatagactgtacccattcttgtaccagccacattgtattggcaaatataagaatgtcaactgttcaaatcacgttcaaataaggcaaattctaagctgtaatcaatatggctctttctgtacatccttgaattttctgtatgccactttgctttttccaccatgtagctatgctggagtatctctgagcctactctggatccacagggtatctgatttgcaaatcattttttgctcagtttaagcctgttaaatttaatttctctaaagttttttttttcttttacaagttttgaaattatgtctatgatgaaaaataaataatattcttgggctttgactttttaagcttatctctcagcttttctttcaaattatcctatgtctgttcaaaatgctcctgcaattttttttgagacagtgtctcactcttttatcctggctagagtgtggtggtgtaaccaattatttctcattgtagccttaattgtcttggctcacacaatcctcctggttcagtaacctgggactacaggcaggcaacatcatgcctggctaatttttaaaaattgttttcatagacataggatcttactatgttgcccaggctgtacttgaactcctgaacccaagtgattctttcaactcagcctcccaaagtgctaggattacaagtgtgaggcgccgtgtgcttctgcaatttcttgacaggactattctcaataataaagagtactacacaggcacaaatctaaaaaaaaaaaatccagcttctagtgtaaaagtataattctccagtatttcatgggtctgcagaagccccatctatggggcagcattgatcaacaaattcagtttattctgagtttcagcccagccacttagtaggtgtgggtctttggacaagtttcttgatgtaaaagagttgtataaaccacatatgcaaaaaaggcagaataatattgattgtaaaaattgcagcaatttttctttttttctttttctttttgagatggagtctcattctgtcgcctaggctggagtgcagtggtgcgatcttggctcactgcaacctctgcctcctgggttgaagcaattctcctgcctcagcctcctgagtagctgggattataggtgcgcaccaccatgtccggctaatttttgtatttttcttagagacagggtttcgccatgttggccaggctggtcttgaactcctgacctcaggtgattcacctacctcggcctcccagagtgctgggatgacaggcgtgagccaccgtgcccggccatagcaatttttcacccctcctatatccatgcccattgccagatgcttttacagctgctcccattgagatacagaatctgttttacaaagcttaaatctggctgaccttgtttgctcaggacagtagaaacctgagaaccgacagtgtgctagtttggtgaagggctgaaatggtcttgaatactacctttttctttttaaagtttggcaatggccgggtgcagtgactcactcctgcaatcccagtattttgggaggccgaggcgggcggatcacctgaggtcaggagttcgagaccagcgtgcccaacatggtgaaaccttgtctttaataagaatataaaaattagctgggtgtggtggcggatgcctgtaatccaagctacccaggaggctgaggcaggacaatcacttgagactgggaggcggaggttgcagtgaggcgagactgtttgaatgcactccaacctgggcaacagagcgagactccgtatcaaaaaaaaaaaattaaaattcacatgtggctcacattttatttcagaagattgcctttttaaaaaaaatcttggccgggcgcgatggctcacgcctgtaatcccagcactttgggaagccgaggcgggcggatcacctgtcaggagtttgagaccagtctggccaacagggtgaaaccccgtctctactaaaagtccaaaaattagccgggcatggtggcaggcgcctgtaatcccagctactcaggaggctgaggcagaagaatcgcttgaacccggaaggcagaggttgcagtgagccgagatcgtgccacggcactccatcctgggcgacaagagcgagactctgtctcaaaaaaaaaaataataaataaataaaatcttaggctgcctctttaaagaactgaagccaggaaggtcataaaagccgaaattttaaaatagctgttattatattcttttcctttgtgaatagccatattcaaacaaagttaatggcaaatcccctctgaggtgggcctggctcatttcagggaggaagccctgcctgaaaacgccacagcttaggctgtcactctttcttcattgaacccagcatctgatcacatcttctgtcactccaggcctgaatgggcggggccttaaacggcatccattcagggatgcttgactaagagccgtccaatcagacccgcagctagagcggacagggcggcttccgggatttggcgcggccttttgagttcctggtctctgtggcctcctgacctacatgcattgggagatccacagctaagacgccaggactccctggaagcctagaaatggtgagagtaccgggtccgacatcccgagagaggggaagggctggttggaaccggtgggaagtggctgtggcgggactcaggcctccctgctgtcagccccacaatctgcgctcggagttctagcctggcccggcctcagacaccttcagcgataagatggcggctgtactgacagccgggcccgagcgtcttgtctcttccctggcagtgaccgtgccctggcctggagccctctctgggcagctctgcacccgcagcgccgagtctctcccagattgtgcagggaccaggggagggtcgtcaggggagaatcctgactcgggtgaggagttcctgaatgggagcagctttggtccgtggggttcctagttcatcttttctctgaaatatttatgggagtcatcgcaaaaatattaaagaatttaaagagttgttcaaaaattatagagcacccctatgggttgtagtttgtggtccattagaggggcttgaagaaaagacttttataagatgcatgatgaaaaaacccaaattctgtaatcaggcacagttacgtagtttcctaatttccaccttgagcctacaaatttcctgattatgtaatcagagcttaattagctgtttatatttggttaagactgaatttcgtttcctctaatgtagtaattttttaaaaataaataaatgcatttgagttagattttttttttaagtaggaatccagagagtagatttccacctcagcctaattccatatcacttaactattttcttttttttctttttttgagacggaatttcactctttcgcctagactggagtaccgtggcgcaatctcggctcactgcagtctccgccttcctgtttcaagcgattctcctgtctcagcttcttgagtagctgggattacaggcgcctgccaccacggccggctaatttttgtatttttggtagagacggggtttcaccatgttggccaggatggtttcaaactcctgacctcgtgatccgcccgcctcggcctcccaaagtgctgggagtacaggcgtgagccaccgcttctggctatgccctgcatttttcacatgtttttcaagaagggtctcaaatgtaccccccaatcctcctttactctagcctaactgtggcttaaagtaaaatactaaatttccagctccttctgacaattccaaacgctaacttttcctccgtaataaagattattaattttttttttcttttttgaaacagagtctcactctgttgcccaggctggagtgcaatggcatgatctcggctcactgcaacctccacctcccgggttcaagcgattctcctgcctcagcctcccgagtagctggattataggcacgtgccaccacgcctggctattttttgtagagacggggttttgtagagaccatgttgggcaggctggtcttgaactcctgacctcaggtgatccacccgcctcgacctcctaaagtgctgggattacaggcgtgagacaccgcgcccggccgctatttgttttttagcgtacttttttttttttttttttttttccgagtctccttctgttgctcaggctggagtactgtggctcaccgcaacctccgcctcccaggctcaagtgattttcctgcctcagcctcctaggtagctgggattagaagcatacaccaccacgcccggctaatttttgtatttttagtggagacggggtttcaccatgttggccaggctggtatcgaacacctgacttcaggtgatctgcccgccttagcctcccaaagtgctgggattgcaggcatgagccactgcgcccagcctggtgtacattcttgataatgtattttaattaatctttttttttttacagcgcattggatggaacatttaaagagattcgttttctatttttaagtcttttcctttagaagaaagcaaagaataatccccttgcaatgtactgtaaataaatctttgtgtgtctttctctttatcttccctaggcacagagatcttatgagaacgttttggggtaattttttttttttggaaactttatggggttttgtgtccgcagtcaccatttagtgtttttctccttctggattttagtactctctgtgaataaacgaagatactgtgtctatgtctgctacagtgtctaggtaatatccgctcctgggtcgttttctgccataggacaacctgaggtatggagtgtagcctctccagggaggaagttgatgccctggggctgagaggcatctcctggcatattcttcctttgaaaagctgacatttagacattaagattgtcttcacctaacccatcttccatttcttggagacacattgctggtcagccaatcagatgctggtactgagagcaaaacagaaataatttctgccacctggattctctaagatttgtgaaaaaaaaatagtatccccaaagacaggaaaaaaaacctgaccccagtgagaaagtgcaagaatttgcaaagtaaactgcacttgaggcactcactggggcatagtgcagtgtctcctcagagggggtcattgagcatttaactgagcagggtggggtgggagaatctaagtgattggatgacctgacttgacacatgactgagacacatctgtgtgtgtgattttttttgtttgttggttgtttttttttttttgagatggagtttctctcttgtcacccaggcttactgtatcctctgccttccgggttcaagcagttatcctttctaagcctccggagtagctgggattacaggcgcctgccaccacacccagctaatttttgtattttttagcagagacggggtttcaccacgttggccaggctggtcctgaactcctgacctcaggtaatccacccgcttcagcctcccaaagtgttgggattacaggcgtgagccaccacgcctgtaatccctgggtttgccaccttgaaaagatttgtttgcttatattgacttcagtttcttaactgaaaattgcattttattagtagagcttgaaaggttaaaaagaaaatgtttacaaagggcataaaagaggtgagtttcaaaatatattccatttgttaagagttcgcatttaccgttttttttgtttgtttgtttttgtttgtttttcccagaatgagtttaggaaacttctcaggtgtgtttttatgggtaatttcaaacagaattccaaggcttagattttgtaatgctatcaaggcaaataatagggaaatctctcttttattttggctgtagaaaataaatacatttccacaagaaaatgtggtagataattggtgagttgcatagattcatgaaaacaacagtttttctttctgtatggtaaatttctgacagtgaatatttttgttctatagcctgtgatcttgatttctgattttaatgctaaatattacaagatgaaacttggtacctcttaggaatgttcccatatgattgtttactacataatttttaatgcaaataataaaataatacatttattgtctgaaaggaatagatactttgggttttcttgttgaggtatgaaatgtaagcaccttaaaatttttttccttcatatgaacactgtgtttcagtaattttgctagatgttttagttttaaaaactgagtaaataactgacataaaaattgaagcttgagcccagggactccaagctaaggctaatattgagcctgcaaaaggaggttattaaaggcaccgttagttcttcctggggagcctccgctgcagatttcccagcctgctcaccctagccatggaagaagcttttattccgagagaagctacacagccctggaaagctggggaccctcaggcagacgcagttaaggttaagatggaatgggactgaaaggatctcactgaagataaagttattcttgctttgaggcagtttctagacttttagaaataaaacaaagtcagatttatgtaaaaaaaaattaaattctaaaggagtattgcagcaggaggaagtaccaaccataagatatttaaggattgcaaaggataggcagacaagggctttcttccataggaaggagcaaataagattagaaagaaggtggtaggggaatggcaaatggagggtgaaaaatcagattctagatcacagaatattttatcctgaagtcagcatgttcttagaagggacataaaattgggtttattttggctcagactgagaatagctcaaagttcaggagctgtgggaagaagataaacttaagtgaagtttgattaacaagtattctattttgaccactgaagacaaattcagccaatttttctatgagaaaaagatttgcagagtctatgtctggctgtgataggtaagcacaaaaaggatagagaattttatttattatagctatttaccaggattatctttatgcttcatctttcttccatttgacatttcctgggttgtatcttttattataaactggtcagcataactgcagtgttttgctgaggtctgtgagtagctctatcaagttattgaacttgagggagattatggaagtccccagtttttaaacagtagctcagaaacacagatggggatggcacgattactcatgcctgtaatcctagcattttgggaggctgaggtgggcagatcccttgaagtcaggaattcaagacgagcctggccaacatggtgaaaccctgtctctactaaaaatacaaaaattagctgggcgtggtggtgtgtggctgtaatcccagctacttgggaagctgaggcaggagaatcacttgaaccctggaggcagagattgtgccactgcactccagcctgggctacagagcgagactctggcttaaaaaaaaaaaaaaagaaagaaagaaaaaagaaaagaaagaaagaaagaaaggaagaaatgtagatgggcccatggagtttgtgactggcatctgcaataaggacaatattgtgggactgagccctgaaccaaggtctgtgctgactctgggtggtttcagaattcaaatgttagacagtgagttggtgttgaagaattgtttggtgttaacaaacaatttggtgccagaaaaaatatcatggaggcctggcctggaataaaactctgggcgtgtgggaaggagaggctctgctttcctgtacacaggccgtcacactgctcattgttctgtgattccagatctcctcttagggtgagagaggactgaaaacttagagaaaaggagttctgatgacagaccccatttttccacagctgccaccacaggattcccacccactcacagtcatgcccactggacattgacatgtgcacagcccttccaggactaggcaccaccctcaaaaatttaaccatggcatttttgatcctagtgttttttgccaaaatcccacaaaattgtctacaaatttttggcatatccctacccccagacactgaatctgcagcagcaacctcttttctccaccaacttggggttctgggccacctgttcataatctcacctgcctgcatggacccagaaataagtagcacaagccagtcctgcctacactgcactcttctccacccattgagttcctttctcttaactcttatttttgttttaggggtacacgtgcaggtttactatataggtaaaattgtgtcatggaagtttgatgtaaattattttgtcactgaggtactaagcataacaccaaacagatttttgttttttaatcttctttgttctcccactctccacccccaggtaggcctcagtgtctgttgttttcccctttgtgtccatgtgttgttattatttagctcttacttagaaatgagaacatggagccgggcacggtggctcacacttgtaatcccagcactttgggaggctgaggcgagtggatcacgaggtcaggagtttgagaccagcctgaccaacatggtgaaaccccgtctctactaaaaacacaaaaattagccgggcgtggtggcacacgcctgtaatcccagctactcaggaggctgaggcaggagaattgcttggacccgggaggcggaggttgtggtgagctgagatctagccattgcattccagcccggtcgacaaagctagactctgtctcaaaaagaaaaaaaaagaacatgcatttgcttttgtctttcagcattagttttctaaggataatgggtcatagtttcatccatgttgctgcaaaaaacatgatcttgttcttttttatggccacacagtattccatgatatttatatactatatttttctttttatataaatattctactttattttcttcttattttattattattattttttgagatggagtttcactcttgttgcccaagctggagtgcaatggcatgatctctgctcaccgcaacctctgcctcctgggttcaagtgattctcttgcctcagcctcctgagtagctgggcttacaggcatgcgccactatgcctggctaattttgtatttttagtagagacagggtttctccatgttggccaggctggtctcgaactccttaccttaggtgatctgccctcctcggcctcccaaaatgctgggattacgggcatgagccaccacgcccggccttctagaaatggggtttcttcatgttgccttggctgttcacaaactcttgaactcaggcagtctgcctgcctcggcctcttaaattgctgtgattacaggcatgagccaccgcccttctgtattatattttctttatccagtttaccattgataaggattcaggttgattccatgtctgtgctattgtgaatagttctgcagtgaccatgaatgtgcatgtgtttttatggcagaataacttatatttctttgggcatatacccatttatgagggtgctgggtcaaatgctaattctgtttttagttctctgaggaatcaccaaactgcttttcacaatggctgaactaatttacactcccaccagcagcgtataagtactcctttatctccacaaccttgccagcatgtttttttttggttttttttttttttttttgagacagagtctcactctgttgcccaggctggagtgcagtggcatgatctcagctgattgcagtctccacctcctgcttcccaggttcaagcgattctcatgtctcagcctcctgaacagctgggattacaggcatttgccaccatgcctggctaatattttttatttttagtagagatggggtttcaccatgttgtccaggctgctctcgaactcccggcctcaagtgatccacccatctcggcctcccaaagtgctaggattacaggcatgagccactgcgcttggccctgcatctgtaattttttgatgttttaattatagccattttggcttgtgtgagaaggtatctcattgtgtattttctttgcatttctctaattaatgatgagtattttttttcatatgcttgttagccacacgtatgcctccttttgaaaagcatccgttcatcttctttgcttcctttttaataaggttgtttgtttttccttgtaaatttatttaagtattttatggattgtggatattagttgtttgtcagcagcatagtttgcaaacatattattctattctgtaggttgtctgtttactctgttgatagtttcctttgctgtgaagaagctctttggtttagttaggtctcatttgtcaatttttgcttttgttgcaattgtttttaatattttcttttttctttttttttgagacggagtttcgctcattgcccaggctggagtgcaatggcatgatctgggctcactgcaatctccgcctcctgggttcaagtgattctcctgcctcagcctcccaagaagctgggataacaggcatgcgccaccatgcctggctaattttgtatttttagtataggcagggtttcaccatgttggtcagactggtctcgaactcctaacctcaggtgatccacctgcctcagcatcccaaagtgctgggattacaggtatgagccaccgcaactggcctgtcccgtttctttataacgctcatgtttctcacgctgagaatagttgtgcactttgggtatttaaagagaaatatttttttagaggaatattttctggtggacttgatcaatattatatctaatctgagttttgtttttaaagatgcttttaactttttattttctcttgatataatcttgctcagatggagagctgttttttgcgtgaattctttgggtttctgtttcagaagccctattagtatcccatgatatctgtgaatgaggtgggctgtcacagggagaacttagacctatctctatccggactcatgctggaaatccagcagtacttttttcatgtcaccattttaaatagaagctgaggctgaaacactgctcccattcccattatcgtgaaggtgcagtttcacccaggaggcctgcaggctctcctcctgcagctcaggcttcattgtctgatgtgacactggagtgctgctgtggcaattggggttcatgtaagatgtgagctgccagctatgagctttgtgttgtgggctgtgtgtcaatggcagatagtaggcgtcaagagaggacatggccatcaggagagggcaagcagggtgctctagcccagtgctaaaggagttaaagagccattgctttaaaatataaatagccaaaaagataacaccctattcagccatttctgtaggagagtgggagcctaccttcagcaggcacttggcttcatgttgcagaattaacctcctgttatgaagatgtgaaaagtttattttgtcattgaatataaccaataagcttacaccgatggccttgccaattgccaggtgaatttaggatgaactacatatgacatggtgctgtaaatttttccacttgtggactaactgtggtgactgtctttctggcttgacgatctcttgagcagattgactgtgatgcgtgtcacattcaggttaaattgtgtaataaaacagttttctttctgttctatcattttggagtttttctggggctggagaaaatttttcttttaattatattttccacacactgtctagaattaccagacattatataaactcataagatgccaaccaagctttactctagaggagacttcctctcaggcttccagtcaactcacagatttctacaaacttcacagggtagcaatcaaccatttcacctcttttagtgactgttgtgtcttcagacctgaaactgattcagagaccagggggaccagaaacccaatcagagtaacatgtgagtgttgagtagacatgtagacatgagaatctccactctccccttcctcctattgctaaaatacccacaaatatgcaagtaacacctgctgcagatccaaattctgaatctaggtcttgagatctgggaaccaaaaaaaaagaaaaaaacaaacctttcatctgaggaatgcaagtccttttagttgtcaaactcagagagacattaaaatgagaacacaattttgtctttctcccacctttgaactatgttttgttgttgttgttgttgttttgagacagtcttggtctgtccccaaggccagagtgcagtgacgcaatctttgctcactggaacctccacctcctaggttcaagcgattctcctgcctcagcttcccaagtagctgggattacaggcatgtgccataacagctggctaatttttgtatttttagtaaagaaggggtttcactgtgttggccaggctggtgttgaactcttgacctcaggtgatcgacccgcctcggccttccaaagtgctggaaaattacaggcatgagccactgcgcctggtcctgaactaagagttttttttaatctcttaaaactgttaactgttgccactagtagctataaattaataatgccacactggacactataacccatactctaaattttaatgatgtatatccaatcaataatcaatgtcatttctgtaaatataataaaaatttctggtaaacaactttgtatcagccatctctctctccctctctttttgccttttcagatcaacttgtaactgctcctaatcaaagtgtagatgacaggcaacttgaaggtttgctcccaggttacaatcctcaagctttgcccaaataaacggtctacttacattcatgttgccttagctttttttcttttaggtagacatatctttcagaatgtgctaaagcagcctctataaggtgatctttcctttgattgtactctgcttgctgtaacacccaagaatgaagagccaggttgatcccacctagaatctgcaaataaggtctgttctcttcctggaatttacaagataaggccagactttgaattgagaatgtagagaaaactaactagacattttatgcattgtcagatgtcaacatagacatcttaaagttcctctttgagaatgtgattctttcagcttctcagatcttgtccagtgacctgctacagttatgtgagggccaccaggtataaatagaatctgatggcagaatacgtaagtgtgaacaagcatcttcagagttatagaaaggtgataatgtatccagagccataaccacaactacacctgtccctaaaatgtgggactggagtagaatattcctgttcttcctcttacctaagagctggataatcaggacaggtgatccaggttctggagcttctccagggcagtttaattttttgtttagaattagcctgagtctctcctgtctgttttatcattgggccatcagcccagggtcactgggaactctcacaataagctgggtgtctttgagacatttgaggatgtccagagcagaattgtgccaggttaacaaaagtggttaattctgcttctatctcagtgtaaaaaattgagtcttcttgtgtttgctcctccccttacacaagaaatgactttggtgggtacccagatgaatgtttctccagttttcagatacttgggtgaaaaacaaccaggatgtctggagactcaaacaaataaacaaattgcttttattttatatggcgattagaaaaatagatgaagcagtcatccaggaaccatccaggaacttttagactagactagcaactgaataaagggttgaattaagcatcatatggttgattcattgaacagatgtgtgcaaaaaaatttgcctttatttgggcccctttctttatattgtagtgacttcttatgtcatcacctgaagggatatttatgaacagaagagttgttattattatatgcgtttctattacctgctaagaatacatatttatcttctaataattaccctagagaaccttaagacatttatttaaattgcttattagtatgcattatataatggacagggcagtggctaaaaaaaattatacaaactctgagatttaagtttctcttaggcaagtttaggaaagcagaactggaaatacgccagtggcacagagaacagaattctacataaggtccactccctgccccagttctgttcagattcactctatttggggtcttgtttagatctggccccactctggagtcttgcctcacagaactgattggaagagatgagagttttggctggtgaatcctgctgcctttctaaagctggtacttacaattttctgaaccccaaaggagataaagggaaaaataaagtatgtattttaatgtcttaatttttaaattttctattaaatcagtgcttgcagattccatttagcatcttgttttctattcctgcagattcagtagttgctccactagtcacacaaaaaaaatataaacacaataaaagtttctctaaactgcgttaaacttttctctattcaggtaatttgtctacatttagcttttattgtatacattttctttaaaaaaccaagaacagaaacagaagatgaaatacatgtgctgggcccttaacctaatgctgggaattattaaatacttagtaccaaatcgcagtgtgttatgaggattaaatcacataatgtattattcgtattagtactctgcaacatactcttgagcacatagtacctgcttaaacattgcattagtacatgtgtatatgttgttttccaaatgtaggcttattcaggcactcctaccttttattgcctctgtaaactttaaagaaccagcaaagaatttgatgctttaggatggagattagttatcttcatttgtgccagaagtaattgtgttgtgaaaagagtacggagtttaagggactctgtgctgtgcctgctttctctaatgctaataatgagcccagggggagcatcatcagcattgacaggggacttagttaaaacacacattcatggccggcgtggtggctcatgcctgtaatcccatttgggaggccgaggcgggtggatcatgaggtcaggagatcgagaccatcctggctaacatggtgaaaccccatctctactaaaaatagaaaaaaaattagccgggcatggtggcaggcgcctgtagtcccagctacttgggaggctgaggcaggagaatggcatgaacccgggaggcggaggttgcagtgagccgatatcacgccactgcactccagcctgggtgacagagcgagactctgtctcaaaaacaaaacaaaaacactcatgtaccctttgaaaacctgcagaatcacattacataaagagggactaaaattactgagtggtttataagctcgttaaagcttgagagacaatgcttagctaagtggttataaacccagggttctattagtttggtgcaaaagttattacagtttctgccattgtaattaatgtggattacttagatgtggatactcagattacatggccaattcacagaaatatctttgctcgtgccctttccacgggttctttttattgttggacacatccatgttgttttaattaagagcctcatgtgattctaaggtgaggccagaatcacttatgaggggttgaagatacactcatgagagttcagtttcacctgtttactacagggtgattatagggcctgttctgtttgggtttggtatggacagggcagtgtggcccatatttttattactgtagcagagattgttggtgtctgtagcaggggagggcacctaaagagaggaaaggagaaacttttatttcttcttcatggggaaactcattgttcctgaatttttcatgttataaaggacagaaatggatggactttttcagcgggtcttggtacttctgcctgtgggtgtggtggtagcaggtaaacaggtggtgctgacacctttaaaggcatattctcaagatgcaggtctaatttgtccagagaatctcaactgaaaaggaatcccagagaaggaggagatagggaaaaaatatgccttttttttttttttttttagctaaacacatctcagatcaagaactgcgtccactctgcctcgtggatttccatgcatttagtacttgcaaacctttacttctcttgcgtttttcctccctaatgagtttgttttaactacttttgaaaattttattgatagtcaagggtctctgaacaatatttctttttagagccttttctaagttctccacatcatggctttttatatgccatggaggattctcaccattaatttatgatctgcagtattaaaaatgtttcctttgtggctgttgaacatgggagggtggggatactcaagattcctgttggggaaaagctggtatccttagtaaagatggagaacaggtactgttgaggctccatttgtgttccccattagcactatgcagaacgggattaaggaaatgcttacttaaacaagatgacggccaggtgcggtggctcccacctgtaatcccagcagtttgggaggctgagcaggttggatcacctgaggtcaggagttcaagagcagcctggccaacatggcgaaacctcatctctactaaaaatacaaaaattagccaggcatggtggcgcatgcctgtaatcccagctacttgataggccgaggcaggagaatcgcttgaacccgggaggtggaggttgcactgaggcaagattgcgccactgccctccagcctggatgacacaatgagactctgtctcaagaaaaaatgatgagatttattacccagaaagtttgaaagataattatcaggagataactgctctctagggtgctcaaaaaagactccttaaaatcactactaaaaattacagaaaatgggaaatatctgtatcttgaattttgcataaaactgatgtttctgtatggttgcattcagcctataatttccttttttttttttttttttttttttttttgagatggagttttgctcttgatgccgtgctgggattacaggcatgagccactacccccaaccagcctataatttactttttgggaacaatatttcagcagtgatgctgtgttatgtgtgtatcagcacatcatacaaatttttcctactgctgttgatgtttatgattcacttggataagcactctctgacagatttttttttttttttactataatttttttctttgttattttattttattattatttttgagacagggcctcactctgttgcccagcttggaatgtagtggcgtgatctcgactcactgcaacctctgcctcctaggttcaagcaattcccctgcctcagccttgcaagttgctgggactacaggtgcccaccgccatgccagactaatttttgtaaaggcctttttttttttaattaagtatctttatgcagctgatgtgtgtaaactatcaaatttaatttggcagctgctctttcttagagtttctttgcatatatctgtccttggaaaatgaagagtttcatcttttatagtccagaaaaactggaaaaaacacaggttcttccatatactggatgtttgataaaatattcttcttaggccaaaatcattggcattattggtgagcttgttagaaattcagaaactcagactttattccagatgttctggaaaaaaaaaaaatctccattacaagatctccagtttattgtacacattaaaatttgctaggtaccttctaactcaacatgtcttttccatctcaaaaatacacagaactcattctctatgatgttaatatagcactcaaaaatatacatgcttgtgttaatgcctttaattttatactttattatccagaaaagtatcatatatacactgatgttgtggatcttattccactctttttttcagaattagagaatacataagagaatatttctgtgttgaaaattattttcggccaggcgtggtgtctcacacctgtaatcccagcactttgggaggccaaggcggatgcatcatccgaggtcaggagttcgagaccagcctggccaatatgatgaaaccccatctctactaaaaatacaaaaattagctgggcgtggtggtgggtgtcttgtaatcccagctacttgggagactgaggcaagagaatcacttgaacccaggaggcagaggttgcagtgagccgaaattgcaccattgtactccagcctgggcaacaagtgcaagactctgtcttaaaaaaaaaaaaaaaaaaattattggaggatttcagtcattcctataagtcagaacctgttctctttactctctcatttcaccttcagtcaaattaaaaattctgccgttggccacccggtaaatatgtgtgtatgtgtgtgtgtgtttttttttcagggaccattgacattcacagatgtggcaataaaattttctctggaggagtggcaattcctggacactgcacagcagaatttatatagggatgtgatgttagagaactacagaaacctggtcttcctgggtgagaataacttcaatacacaatcctcagatactgtaaatgtttctttttttggtgttgtagaatgttttttggtaattgatgctttgcataaatgagtttcacatcactgttttgaagaaaagcttgggaatttgtcagtgtagaaaagaatttcttcaagataaacatcttgaagttcaccttgatctgaactttccacattcctgagcagacctgtagtttttactcaccattagcgatcatttcaaaatttagtgacataaaatattgttgcccacaccttaacatctaagtgtcaccaccagcttttgattcagtggtactgggtagagaaattattttatttatttatttatttatttatttatttatttatttatttatgagatggaatgttgctgttgcccaggctggagtacaatggtgcgattttggctcactgcaatcctcacctcccaggttcaagagattctccagcctcagctttctgagtcgctgggagtagaggcatgtgccaccaagcccagctaatttttgtatttttagtagagatggggtttcaccatgttggccaggctggtctcgaacttctgacctcaagtgatccaccctccttggcctcccaaagtgctgggattacaggcatgagtcaccgcagccagcccattttctaaatattaagaaattactgttataaattactgttttgggatgaatatactagaatattctattatgttctctttactgagcacattatttgaagaatatgaggaacattcatgttatttatttttaataaaacaggtgttggtgtctctaagccagatttaatcacctgtctggagcaaggaaaagagccctggaatatgaagagacacaagatggtagccaagcccccaggtaggtggagagtgaacacaatggacaacacagataagacgtccaaaggtcaaggagaaagccagtccttaaaatagattttgggaagctgtgttccaaagaaaatagtttcaggaaagcctgagagtttaaaaaattttactctcacataggggcatcttctgcattgtgctattaaattttctaaggattctactttcccttttgtgatcttccttgaagtttacagtgacagccaaagtcttcttcatggcatataagagactgcacaatctactttttcatattttcaagggaaccataaatatctgcataattttataaaactctgttaggctgggcaaatgtctcacaccagtaaacccagcactttgggaggccgaggcgggtggatcacctgaggtcaggagttcgagaccagcctggccaacatggtgaaaccccttctctaccaaaaatacaaaaatttgttgctcgtggtggcgcacttctgtaatcccagctatttggtaggctgagtcaggagaatcgcttgaattaaggaagcagaggttccttaattctgatgtcgtgccattgcactccagcttgtgtgagaagagtgaaagtccatctcaaaagtaaaaaaaaagaaacaaaaacctatgttaaactgtttttcatgttttcttgttttatcgtgtttaaaatatgtgagagtagtggtttctgttccatttgttttttcatttttctgcataattcatcctgtttttattagtatagtcttgaaatacagtttggaattattatattaagtatgacatcctcctggtttgttttttttttgtcaagattgctttggctattcaaagtttattgaagttttatgtaaattttaggattgtgttttacattactatataaaagatagcactggaggctttttttgagatggagttttgctcttgttgcccaggctggagtgtaatggcaccctcttggctcactgtaacctccgcctcccggattcaagtgattctgctgcctcagcctcccgagtagctgggattacaggcacgtgccaccatgcccagctaatttttgtatttttagtagagccggggtttcaccatgtaggccaggctagtctcaaactcctgacatcaggtgatcggcccacgtcggcctcccaaagtgctgggatcacaggcgctgggtcttttttttttttctttttactgagatggagttttgcacttgctgcccaggctggagtgcaatggcacgatcttggctcactgcaacctccgcctcctgggttcaagtgattctcctgtctcagcttccccagtagctgggattataggcatgagccaccatgcccagctacatttctttttattaaattgtttaatttatatttaaaataattgcttaaagatatgaagttactattaagagtttattatttttttagatacgttttttctcatttcctgttttactgccttaatttttgtttaattttgttgtgacatgccttgcttattttttattctgtttcacatgctttctacaaatgcaacgcagtcatcctgaaatataatgtgatcatgttgaaaaatggagattacataaaacatcttaaagttaaaacaatacattttaatatcataacttcaattgaatacaaaacctatatctttatattttccagtttgttattgatattataaatattatcttgtgtatctattaataaatgtaggcagatttaagtgttgttttttctatttacagaagaagtttaagggttttatgcaccatcattataatagaattctatatgtgtctctatatttacatttaacagagagctatttatttatttatttatttattactattttttttgagatggagtcttgctctgttgcctaggctggagcgcggtggcacgatcttggctcactgcaaccactgcctcatgggttcaagcaattctcctgcctcagcctcttgagtagctgagattacaggcacgagcaaccacacccaactaatttttctatttttagtagagacggggtttcagcatgttggtgaggctggtcttgaattcctgatgtcaggtgatctgcctgccttgacctcctaaagtgctgggattacaggcgtgaggcaccgcgcccagcctatatacattttcatgatgctgtccagcatgattttatttttcaacataatggactcattttaggatttctttttatttatgtgcagtctcactgtattgctcagactaatcttgaactcctggtctcaagtgatctgactgtctttgcctcctaatgctatcggattacaggcatgagccactgtgcctggccaccatgtagcatttgttataggactgtgttagtggtgatgaactccctcacttttcatttgggaaagtctttatttttgtcttgtttttgaagtaaaataattttgaataaagtattacttgttagaactttttttttgagacggagttttgctcttgttgcccaggctggagggcaatggcgcgatctgggctcaccgctacttccgcctcctgggttcaagcgattctcctgcctcagcctccggaatagctgggattgcaggcatgtgccaccacgcctggctaatttttttgtatttttagtagagacggggtttctgcatgttggtcagactggtctcaaactcccaacctcaggtgatctgcccccttcggcctcccaaagtgctgggattacaggtgtgagccactgcgcccagctagaattttttttataaaatcaaaattggtaaagttctcagtttttgtttcttcaagtaatctctgtattactttttcttttatagtcttcttttaagatttctttcataaatatattgatctactttatagtgtccaataagctttacattgcatgtttagtgttttacaattttgtttctgtgttatatattttagaatatgccacctcatagcagttaattgtgttttgatgttttagtttatattatcattttatatgacaatattaaagtctgtacaatttaagaatggatagagcaaaatcaaatattagtctttcattcatatatctgtttccaatatagttatgtttgtttccctgtataaatattatctctatcttttatgactgtatattttttgtgtaggtttgttgtgaatggttgtttaatcttttctaggtaagctgtcataaacattttactagttttagcatctatttgtgaatatattatttttgtgtggggaaaaattttggacttgacaataatttaaaaacttatcagaactttattaggtattattgttcatttttacttgtcaaaaacacataatctttacagtcaaatgtttttaaatattcggtttagtcatattaatggtattgacaatgctatgcaacatatccctagaatgtttttatctcacaaagctaaatcttgacacattgaacagctaccagtttttttcatttcttggtgcttttcaaatgccactatgttttctgtttttaacagtgtaactgctacatatatctcattctatctctgactttttatgactggctcgtttcattttgcataatatcatcaagctttatctttatagttgttaagaatattttctgcttataaatcctgagtgatattccagtatttttatatttcaaattatttctactgaatgatttggtgacagaaatttgcattgcttttagttattggctttcagtaaaaactgtaataattatagatatgcaaatagctctttatataactatatatatgacagtttatatatgtgctgcattctcttttattattctgctttttaacttttatattcatagtaaattgttttaattctgtagctcgtaatgtgttttgaaatcaggaactgtaatgccttcaacattgtttctttttttgaagattgttgagtattttattttctcttgagattccatatacttttgctattgctgtttacattttttcaaaaatgcagttagaaatttagttaaatatcattaaatctgtagattacattgagcagcatggacatcttcaaaatattaattatttcagtttttgaatagatgcattctccagagtgtgctgtttaatttttatatatttataaatttttcaggtttttttctattattgttttataccctcattccattttggtcatacaaagtaatgcataaaaattttgttttatgaaatttgttaagacttttttcaaggagaatcttgtaagatcgtgtgagtatttatttatttatctgagacagagccttgctctgtcacccaggctggagtgcaatggcctgatcttggctcagtgcaacctcctcctcccaggtgaacctgcctcagccttccaagtagctggaattgcaggcacctgaaccatgcccagctaatttttgtatttttagtagagacagggtttcaccatgttggccaggctggtctcgagctcctaacctcaggtgatctgcctgccttggcctcccaaactgctgggattataggcttgagtcatcacaaccggccatatgagttattgagaagggtgtgtatcctgatgttgaggagtgttctctatacttcttttagaaataaatgttttatactctcttcaaattttctctttccttattaatattctatcttgttttatttttattacagaaagtggcgtattaaaatatcctactataattatattgctctctatgtgtttctttaattctgtcaatatttgctttatatatttgaaagccaaatgtgagatacacacacacacacacacacatttgttatgtttacactaaatgactctattattgttaatttccttctttgtctccatatagttttgacttagaatacattttataaaatatgacactttgacttcagatatagcttatgtaatattattttgatctcttcttctctcatttggttagtatctgcatagaatgtgtatgtccgtcttgccactttctgtctttttttatcattaaatctcagctgactcttgcaggaaagtaagttggattttgggttttaagattttttaaataaatccttttattgaaaatatgtctcttgattggaaaattaattgtatatatatttaaataattttctgaaacaaaaacttaataatgttttattgttttatttgattcttgtatctttgtccctcattttctctctttctgccctcttttgtgtctgtttcacttttgtattaatatgcttttacttcttgtttttttcatctaaacatatattctttgtggtaccttggggattacacaaaacctctaaaagatatgagaatatattttaatctagtaaaaagtgaacttcagctgaatacgaaaatgtttctttggctgtgcttggtggtttacacctgtaatcccatcactttgggaggctgaggtggacagatcacttgaggtcgggagttcgagtccagcctgaccaacatggagaaaccctgtctctactaaaaatatgaaagtttccaggcgtggtggcacatgcctgtaatcccagctactctgtcagctgaggcaagagaatcgcttgaacccagaaggtggaggtcacagtgagctgagattgtgccattgcactccagcctgggcaacaagattgaaactccatctcaaaaaaaaaaatattcttcctcaaattttttatttttatattctctagaattctttaaattttatagaataattacaaatgttttctgcaccgttataacaatggtaggaaatttcatttttatgtaagtatgtacatatctttcctagaaaataatgtatttttatatgattatgtgttttcttttttttttttttttgagatggagtctctctctgtcacccaggctggagtacagtggtgcagtcctggctcactgcaacctccacctcccgggttcaagtgattctccttcctcagactcctgaatagctgggattatagacacacaccaccacacatgtctaatttttgtatttttagtggagatggggttttgccatgttggccaggctgatcttgaactcctgacctaaggtgatccatctgccgtggcctcccaaaatgctggtactacaggtgtgagtcaccacacctggcctgtcattttcttgaatcatattattttcaatggaagaaactgctttcagtatcttttatgtatagggcacatgcagtgccaatatactttttcagaatttgattactttggaaggtttttttatttttggcaggacagatttgctgatggtattattctcacttgataggtatttttccaggactttgactatatcacacagttcccttctggcctccaaaatttttgttgacagttcagtggttatctgaaagcctgcttgtaagtgatacatcacttttttcttgcagtttccaagattctctttttgtctgtgacttttaaaagtgtgcttatatatgtgtttgttataagtatctttgtgtgtttcctagtttgtttgttgagcttcttcgtttttattttatctttcttttagaatttttttgtttgtttgtttttgttttttgagacagagtcttgctcttgtctcccaggctggagtgcaatggcgtggtcttggctcactgcaacttccacctcccaggttcaagcaattctcctgcctcagcctcctgagtagctgggactacaggtgcttgccaccacacccagctaattttttgtatttttagtagagatgaggtttcaccatgttagccagtatggtctttatctcctgacctcatgatctgcccacctcggcctcccgaagtgctgggattatagacatgagccactgtgcctggccagaattttttagttataatttctttttgtattttttacctccacaatttctgtttttttgatatttcatacttttgttaccctcatttttctgtttttctgtagttgtctgtgtttccatttcactcgttgagtattattcaatttaggacattattaaaatctacctgttacataatttatggcatagtctgaaaacaattgtcttggttagagattttgggagtctatcaaacaggttcttatgatgtgtcttgtctgaatttagtttttactttctagttaaaggagtttattcatgtttctttatattcatcgcttgctacacctgttccctgcctgtggtactgcagtttctctgctgctgtaacatttacatttagtctcagcaaactcaaagggtcacttcaaagtatatgaccagttattttagcactttatgtcattggaaacagaaaccaagtgtctggaaaagcccctcaaagacagaaataaagatgtatgtgccagtattttacttgtcttttaaaaaagaattcaggagcttacaatttacttgtaaaggctctttgctatattggggagcagaaagagctgttttgggtagatgcaataaacttttctcttcattctatgaggctctttgtggcactgcacatacttaactcatttatacattttccacaaatgtattttggtctgtatgtttttgttacatttatgtctatgaagtaattatggcctatggtattttgctatgccatcttatgtagtttgtataattttatagcttagatttgtaaagtatatccatctgagtctagtaagatgaagtaatttgttatttctatttttttcagttgtgtgttctcattttgcccaagacctttggccagagcagggcataaaagattctttccaaaaagtaatactgagaagctatggaaaatatggacatgacaatttacaattaagaaaaggctgtgaaagtgtggatgagtgtaagatgcacaaaggaggttatgatgaacttaagcaatgtttgacaactaccccgagcaaaatatttcaatgtgataaatatgtaaaagtctttcataaattttcaagttcaaatagccagaagataagacatactggaaataattctttcaaatgtaaagaatgtggcaaatcattttgcatgctttcacacctaactaaacatgaaagaaatcatactagagtgaattgttacaaatgtgaagaatgtggcaaagcctttagtgtgccctcaaagcttaataatcataagagaattcatactggagagaaaccctacaaatgtgaagaatgtggcaaagcctttaatgtgtcctcaagccttaataatcataagagaattcatactggagagaaaccctacaaatgtgaagaatgtggcaaaacctttaatatgttctcaagccttaataatcataagagaattcacactggagagaaaccctacaaatgtaaagaatgtggcaaagcctttaatgtgttctcaagccttaataatcataagagaattcatactggagagaaaccctacaaatgtgaagaatgtggcaaagcctttaaccagccctcacaccttgctacacataagagaattcatactggagagaaactctacaaatgtgaagaatgtggcaaagcattcagccagtcctcacacattactacacataagagaattcacactggagagaaaccctacaaatgtgaagaatgtggcaaagcttttaaagtatctgtacaccttactacacataagagaattcatactggagagaaaccctacaaatgtgaagaatgtggcaaagcctttaaccaatcctcagcccttactacacataagataattcatactggagaaagaccttacaaatgtaaacaatgtggtaaaggttttagccaatcctcaacccttactaaacataagataattcatactaaagagaaaccctacaaatgtgaagaatgtggcaaagcttttaaccaatattcaacccttaataaacataagataattcatgctagagagaagccttacaaatgtgaagaatgtggcaaagcctttaacaagtcctcaattcttaacagacataagataattcatactaaagagaaatcacaaaccttaaagatgtgacaatgctttttatgaaatcccaaacttttttaaacataaaagaaatgctggtggccaggcacagtagcttacgcctgtaatcccagcactttgggaggccgaggcgggcagatcacctgaggtcaggagttcgagaccaacctaacatggtgaaacaacgtctctactaaaatacaaaaaaaattagccgggtgtagtggtgggcgcctgtaatcccagctagttgggaggctgaggcaggagaatcgcttgaacccgggaggtggaggttgcagtgatctgagatcacgccattgcactccagcctgggcaacaggacgagactctctcaaaaaaaacaaaaacaaaaaaaagtgctggtgagaactcatagaaatgtgaagaatatgagaaagcctttaaatggttgtctcacttgattgtaggtaagatactttatactggagaaaactcctacaagtgtgaagaatgtggcaaaacttttgactaatgctcacaccttggtgcacaggaaataatttatattttagacaacttgtacaagtataaagaatgtgacgaagccattaataactgctcacattttaacatcagagagctaatacaagcattaaaggtgcaattactgtcaaaagatcttccagaaaatataagcctttaaaatgtattaaatttattgctgtaaattcttatgtcttacagttcagaatctcttcatgcaaattctgtttttacttttctagtactcatactagacccataattttcttgattcttatttcgttttgttttataggttataaagtattcattatattagctggtcagtgattatagtaattgtttttatgaaatttagtagtgcacacaaaataattttcaaaggtaattccattagtgtattaagttttatttagtgttagaacattccattttgttcttttaagtgcagaaacttatataagcctacttttttttttttttaagatggagtttcactcttatcacccaggctggagtgcaatggtgcaatcttggctcgttgcagcctccacctcctgggttcaagtgattctcctccctcagcctcctgagtagctgggattacaggcatctgtcaccccgcctggctaatttttttatttttagtagagacagggtttcatcatgttggcaaggctggtctcgagctcctgacctcaaatgatctgcccacctcagcctcccaaagtgctgggattataggcatgagagaccgcacccagccaagccaacctttatttagttattttaaaaaaatttttaataattgacataaatacatttatttattgagtcaatttgtccaggtaagtactggggaagcttcataagttttgaggatatttttatacataaatatatcaaacatgagagtgcttgctgtataacagatgctccgtaatgcagaaatatttgtgttaaaattagtttgtaactttgattcggaaattaaaaataccattgggccaggtgcgatggctcacacctataatcccagcactttggaggttcgaggcgggcagataacaggatcaggagatcaagaccatcctggctaacacggtgaaaccccgtctccactaaaaatacaaaaaaattagccaggtgtggtagtggatgcctgtagtcccagctactcaggatgctgaggcaggagaatggtgtgaatccaggaggcagagcttgcagtaagcccatatggcgccactgcactccagcctgggtgacagagcgagactccgtctcaaagaaaaaaaaaaagaaaaaatattggctgggcatggtggctcatgcctgtaatcccaacactttgggaggccgaggtgggtagattgcctgaggtcaggagttcaagaccagcctggctaacatggtgaaaccccagcactacaaaaatacaaaaattagccaggcatgatggcaggtgcctgtaactccagctacttggaaggctgagacatgagaattgcttgaatgagggaggcagaggttgcagtgagccgagatcacgccattgcactccagcctgggcgacagagcgagacttttgtctcaaaaaaaaaaaaaatacaaacaaaataaaatatcaatgctgaagatataacattgatttttttcatgtggagatgacactttttttcaggcttcaaagctgaatcttgctgaatttaaagagaaattctgctgctttaatttcctaattatcttgattttttttcactttttatgtgtattctaactatgtatgcatcacagccctttttcttcttgctctgttatggctacagttttctctctgttatctccatgccatgtcatttcacatggtactttgtaggttctgaggagaaagttggtactttttaatgcattgaaaaattggttttaactagagagtttgcttatcaatataacttttagattaattaaaataaaagacatacactttccacaagaatgtatcagcatagaatatatcatatatcagtaagaagaatatatcagttagcatggttttgtttgtttataaaagaaaaaccttattagattctcacacaaagagtgaaaaatatagtgtgctaaaatatatatcttagaaattttatttttgagcaagttgactgcaagtgaacaatttcgaatttaattttataatatagcataacttatgtttctatacagtatcttcaacttttaagtgtgaatgttaaagttggcaaaataataaaatgatctctggatttgaaatttgatgtaatttttttttcatgttgctattacaatttggaggaatttctcactttttttcctagattgcagtttttactctttgtcacctaactgtagtcaactccctggtcattttctctggaaaacttttggagaacatggctgcttttggattaaaatatttcccattattttgcataaaaaacgagtttactgtgttcacagagtggctagtcatgggaccataagcaacagctccaacttttagtgtttttcatactgttaccatcaacaacagaaactccaggtaccccatgctcgaagtaaaagccctaacgtacattggctcttcccatacactctgctgggtccagaaaatgctgttaaatactagagtttctaagctgggcatggtggctcatgcctgtaatcccagcactttggaaggctgaagtgggtggatcacctgaggtcaggagtttgacaccagcctggccaacatggcaaaaccccatctttaccaaaaatagaaaaattaactgggtatggtggtgggcacctgtacttgggaggctgaggcagaagaatcccttgaatccgggaggcggaggttgcgttgagccaagatcgtgccattgtactccactctgtctctaaataaataaataaaataaataaatatcagagttcctatggtcatggctgacaaactaagtgacaaaaactaattttgatactattcagctgtttatgacaaagacagtatttgaaacattgttatatgtgtgtgtatatatatatacatatgtatataacatatatataatttttagacaagagtcctgctctgtcacccaggctgaagtgcagtggcatagtctcagcttactaaaacttccacatttcaggttcaagcaattctcaagcctcaacctctcgagtagctgggattacaggttggtggcaccatgcccagctactttttctatttttcatagagatggggtttcttcatgttggccaggctggtcttgaactcttgatctcaagcgattcacccaccttggcctcccaaattgctggaattacaggtgtgagccactgcacccatttaattatatatatattatatatatgtaatataatatatatattatatatatgtaatataatatatatattatatatatgtaatataatatatatgtaatataatatatatattatatatatgtaatataatatatatattatatatatgtaatataatatatatattatatatatgtaatataatatatatattatatatgtaatataatatataatatatgtaatataatatatattatatatgtaatataatatatattatatatgtaatataatatatattatatatgtaatataatatattatatatatattatatttatatatatatatatatattttttttttcgagatgatttcaatctgtcccccaggctggagtgcagtgcagcctccacctcctaggtttaagtgattctcctgcctcagtcttctgagtagctgggactacaggcagacaccaccactccttgctaattttttgtatttttggtaaagacagtttcaccctgttagccaggctgctcttgaactcctgacctcaagtgatctgcccactttggcctctcaaagcactgggattacaggcatgagtcaccatgccaagctaaaaatatatttttccagttgacagataaaatgtgtattctgcaatacaatatttttaagtacatatacattgtcacatgcttaattctaggtaattaatgctttacctcatgtagttaacatttttgttgtgagaccacatagcattgtcttaacatttttcaaaactagaaatacattataatgaactatagtcactgtgctgtaaaataaatcttctggacttattcctcctattcaagtataattatatattttctttccaactccccatttcttctaaacacgttggcatctggtattcaccattttattctctacagcaatgagattgttttttagaattcttgtgtaagtgaggctgggcattgtgtctcacgcttgtaatcccagcacactgggaagccgaggcaggtgaatcacttgaggacaggagtttgacaccagcctggccaaagtggtgaaaccctgtctctactaaaaatacaaaaaaattagccaggcatggtggtgggcgcctataatcccagctacttgggaggctgaggcaggagaattgcttgaacccagcaggtggaggttgcagtgagctgagatcacaccattgcaatccagcctgggaaacgagcaaaactctgtcttaaaaaaaaaaaagaattaatctgtaagtgatatcataagatagtattcattctgtgcctggcttatttaatataatgttctccaggttaatccatgtcactgaaagtaatagaattttcttttttaaaagatgaatagtattcaattgtgtatgcctaccacattatttttatttactcattagatgtcaaactgttgactctattttggctattgtgaggagtgctacaaacaacatagaagtgcaaatgtttcttcatcctgattttatttgttgtggatatatgtccagtattgaaattcttgtattatatgatagttttgatcttattttttttgtgagatctcttttgtttttcataatggctgtcctcatttacatgaaaaccaacagtgtgcaagcatccccttttcttcacttctatgccaacactttatttttatttttatttttttgagacggagtctcgcacttgttgcccaggctggagtgcaatggcacaatcttggctcaccgcaagctctgcctcccaggttcaagtgattgtcctgcctcagcctcccgagtagctgggattacaggcatgtgccaccacgcctggctaattttgtatttttagtagagacagggtttctccatgttggtcaggctggtcttgaactcctgaccttaggtgatccacccgcctcggcctcccaaagtgttgggactacaggcatgagccactgtgcttggtcacttttatttttaataaaaatcattttaacagtagtgagctgataccttgtagtttttttttttttttggcatgcctttctctgataacaattgacattgagcattttttaatatatttgttggacatgtatatgtcttgaaatatatttaaggtttttgctcatttttagtagttatttgttttcgttgtatagttatttgaggttttttttttttttttttttttttttttttttttttgagacagcgtttctctctgtatcctaggctggagtgcagtgatgcgatcatggctcactgcaccctggacctcccaggttcaagtgatcctcacacctcagcctcttaaatagctgggactacatgcatacaccaccagcctggctaattttttttattactttttgtagagacaggggtctcactgtgctgcccaggctggccttgaactcctgggctcaagcagttctcccaccagggccttccaaagtgctgggattacaggtgtgagtcactgtgcccagccgagaatgcttttttttttttttttttttgagacggagtcttgctctctcgcccaggctggagtgcagtggcgcgatcttggctcagtgcaagctcctcctcccgggttcacgccattctcctgcctcagcctcccgcgtagctgggactacaggcgcccgccaccacgcccggctaattttttatatttttagtagagacggggtttcaccgtgttagccaggatggtctcgatctcctgacctcgtgatccacccgcctcggcctcccaaactgctgggattacaggcgtgagccaccgcacccggcccccctttttttttttttttttgagttggagtcttgctctgttgccaggctggagtgcagtggcgcgatctcggcttactgcaacctctgacaccctagttcaagcgattctcctgcctcagcctcccaagtagctgggattacaggcacgcaccaccatgcccagctaatttttgtatatttagtagagacggtttcgccatgtcctcggcctcggcctcagcctctcaaagtgctgggattataggcatgagccactgtgcccggtcttgagtttcttatatattttttatattaagctcttgtcgtgtatgatttgcaaatattttgtctgttttttagttgtttcattctgttttaccagattctgtgcagcagctttttaattaaaagtaatctgagtaatcaatttttcctttggttatctgggattttgatgttaaataaaaaaattcactgcccaaatcaatgttattatgctttcactctatattttttgtactaattttagagtttcaggccttacatttaagaacctaatttattttgagttgatttttatatatggtgtgagattagggtctcattgctctgtatgtgggtgtaaagtttccttaaccatttattgaaaatactgttctttccctaagaaattgtcacccttacatttgtgtaaaatgtgtttcgtttcttcctttaatgttctttagattataatgtacaggtctttcaactttttggttaaatgtatttcaaagtatagttactagattatttgtagatgggattgtttttaaatttcattttgatatatttattactgtatagaaatgctactgaattttagatattgcttttgtattctgtgagtttaatgaatttgtttattataatagcttttggtaaagtcttaggcttttctatacttaagattatgtatagaaataaaaggttattaaacagggataatttaacttactttttccaatttggatgcctttggttttattcccttctctgttatatttagtaagactaaaaaaagtgcacattcttgccttgttctagctcttagaataaaatcttaaactttttttgtttatttagtatgttgttagctgtgcatttttttgttacatatagcatttatcagcttgaggtgcaatgctgctatacctaattttttcagagatgtattatgagggactgttgaattttgtcaaacttttattctgcatctgttagtagagttgtgaaatcacaactaattctacataaataccaaacattctcagagacttgtacgaacatctctgtgcattcaaagtacaaaatttagagaaaatagataaactgaatacatacaacttccaagtttgaatcaggaataaacagaagtcttgagagcaaaaatgcataaaattgtataatgaattagtaattaaaagaaaccctaccaaccacaaaaagccctggatcagatgaatctgcagaaaattttaccacgtatgcaaagatgagctggtcctaatcatactgattgtattccaaaaaaaatcatggtgggattccaccctaacttattacataaaattagtatcatgttgctctcaaaatctagtgaagacagaacaacaaaaacaactacaggcctatattcctggtgaacatagaaacaaaaatcctccatgaaatactaggaagctgagttcataagcaaataaagttactttgccacagtcatatgagctttattctatgaatgcaataatgtttcataatatgcaagtcaataagtgtaattcaccatgtgaaggtaattttaagcaaaaaagtatatatcacaatatatgcagaaatagcattcaagaaaattaaatattgactgatgaacatattcgcaaaaaaccaggcattcaagaaacatacctcaaaataataagaggcatctatgacaaatcctcagccaacatcataccgaacaggaaaaagctggacgcattctctctaaaaataaaaataatacaagaatattcactctaaaccgtcctattcaacatgattctggaagtcctagcaagagcaattcaaaaaagaaagaaaaggaatccaaattttctgcactgatgatataattctttttctagaacctttaagattagaccagaagacccctctgcctaataaaagactaaagcaaagtcttaggatacaaaattaatatacagaaatgagtagcatttctgtacaccagtaacattcaagctgagaaaaaaaaatcaagaagagttccatttacagtagccacaaagaaaaaacaatatacatagaaatgcattaaagaagtaaaatatctctacaaggagaacgtaaaacactgctgaaaaaaacagagacaaagcaaataaatggaaaagcatttcatgctcatgaatttgaagaatcaacacttaaaatgttcatgctgcataaagcaagctacagattaagtcctttttctatcaaactatcaatgactttttttaaatagaattaagaaaagaaggctgcatgcagtggctcacgcctgtaatcccagcactttgggaggctgaggttggcggatcacttgaggtaggaatttgagaccagcctggccaacatggtgaaaccctatctctaagagttacaaaaaaaaaaaaaaaaaaaaaaaagacaggtatggtggtgcatgcctgtaatcctagctactcgggaggctgatgggaggattacttgaacccgggagacagaggttgcaataagctgagaatgccactgcacactccagactggatgacagagtgagactccttctaaaaaaaaaaattaaaatatatatggaagaataaaagaattcaaatagtcaaagcaactttagataaaaaggacaaacctggagaccttacattacttatctttaaactgtactataagctacagtaatcagtataacatggttctggtacaaaaatatacatatagagcaatggaaaaaaatgagagagccctgaaataaagctacactactccaacttattattgaaaaagtgtacagaaataaaggaaaaataacttcctatgcaataaatggtagtgggaaaactggctagtcatatgcagaagaaaattgaatccctacctcatatcataagaaatataacaagatagattaataactgtgagtcttcaagctacaaaaatcctagaagaacatctagaaagtacatttctagacactggcctctagaaataatttatgactaacaccttaaaagtgaatgcaacaaaaataaaaattttaaaatggcacctaagtaaactaaggagcttttgcacagtaaaaagctatcaacaaagtaaacatagagcctacagtgtggaataaattatttgtatactgcataccacaaaggattaatacatggaatctataagatttaataagaaagtagacaagtgatgtaaatacttctcaaaggaagacataaaagctgccaataaacatgcagaaaattgcacaagatctctaatcagagagacggaaaattttggagagaagaaaatctttataaactgttggtgaaaatgcaaattcagcccctgtgaaagtttctacatttttcaaataactaaagatagaattgccatttgacccattaaccccttttttgggtatctacccgaaggaaaatattttactaaaatgacacctgtacttacatgttgattgcagcactatttacagtggcaaaaaccttgaaaaactatagggtatgatgtacactatgtgggcaatggaattattaaatgtgcaagcctcaacatcctgatgtatacaggttacaaatctgcacatgtaccacttgaatctaagataaaaataataaaatgttttgtggtataatggcatgttacatttctccagttctgaattagtagttggaattaggggtgagagaattatttgccccttagggcataagggtaaatgtttttataccaggtctccccacactctataagctagcctctctgaaagctcttgggctatatagctcaagaagtgttttattcccaagtatgcagataaaataaaagaccctacatctttattttttatgtatcaactgtacattagactatagagttaatttgttagtctactcttttgggggaaaaatggtaagtggtttaatcacattaaaaatttttttagaaaatgtgaggttgtgaaaatcatggttaattccttaattaggaaaataaaacatttttctaaaaaaatgcataaaagtctaatgtccatagcctaagaacaatgaaacagagactgtggtttatttaagaccacactgctgcaaatgcttattccatcacaagaaatagaaacaatgggtcagaaggtgttttcagagtacttttcttaatctattgcagtgtttaaagtttggtctttattatctcctatataagtctgtacttaaaaagccatgaattttatgttaatatgctcacacaaatatttttcctagaaaagtactagtgtgtttgcaatgaatgtgtagcatttctggcctaccttgtgctgctgtgtttgtgtgaaattagaagacaggaaataaagcagagttgaccatgacatttctagtttctacaaccacaccatctgaaatgtagtgttatgtcaacaataaataatgacagtatttcaaaatatagaaacaaattgatactttatatatttagttttttatagtttataaaaatttgtagtttctgaattattataaattaaacaacttgaacatgaagatacctaaaagttttatctaaatgatagtattaaaattgtaatagcttatgattgtgagtcacaattgccctattgggtttactggaaagtagttatttatcttctaatagtagatagagaataggtttttataatcctaaggatacagattttttttttgagacaaagtttcattcttgttacccaagttggagtgcaatgaaacaaatcttggctcactgcaacctctacctggcagcttcaagcgattctcctacctcagcctcccaagcagctgggattacaggcatgtgccaccacacccagataatttttgtatttttactagagacagggtttcaccatgttggccaggctggtctcaaactcctgacctcaggtgatctgcccaccttggcctcccaaagtgctgggatgacaggtgtgagccaccgtgcccagcccagatcttttaaaattagtactgcttagatttgtacaaaattcataggcttgcagtagcagaaattttaatatttttttctaatagaagagaaaaagtggctgggcatgatggctcacacctgtaattccagcactttgggaggccgaggcaggtggatcccctgaggtcaggagttcgagaccagcctgactaacatggtgaaaccctgtctctactaacaatacaaaaattagccggatgtagtggcgggtgcctgtaatcccagctacttaggaggctgaggcaggagaatcgctggaacccaggaggcggaggttgcagtgagccgagattgtgccattgcactccagcctgggtgaaagagcaagactcagtctcaaaaaagaaaaagaaacaaaaaatcaataaaattaattttttaaaataagtttaaaagaaacttcatatttgttcatttttttttttttttattgatcattcttgggtgtttctcgcagagagggatttggcagggtcataggacaatagtggagggaaggtcagcagacaaacaagtgaacaaaggtctctggttttcctaggcagagtgtttgtgtccctgggtacttgagattagggagtggtgatgactctcaagaagcatgctgccttcaagcatctgtttaacaaagcacatcttgcaccgcccttaatccatttaaccctgagtggacacagcacatgtttcagagagcacagggttgggggtaaggtcatagatcaacaggatctcaaggcagaagaatttttcttagtacagaacaaaatgaaaagtctcccacgtctactactttctacacagacacagcaaccatccgatttctcaatcttttccccaccttgcccccttttctattccacaaaaccgccattgtcatcatggcccgttctcaatgagctgttgggtacacctcccagacggggtggtggccgggcagaggggctcctcactgcccagtaggggcagccgggcagaggcgccgcccctcacctcccggacggggcggctggccgggcggggggctgacctccccacctccctcccggatggggcggctggccgggcggggggctgaccccccacctccctcccgggggcagctggcctggcaggggctgacccccccacctccctcccaggcggggtggctgccgggcggagacgctcctcacttcccagatggggtggcagccaggcagaggggatcctcacttctcagatggggcagttgccgggcggaggggctcctcacttctcagacggggcggccgggcagagacgatcctcacctcccagatggggtcacggccgggccgaggcgctcctcacatcccagacggggcggcggggcagaggcgctccccacatctcagacgatgggcggccgggcagagacgctcctcactttccagatgggatggcggccgggcagagacgctcctcactttccagactgggcagccaggcagaggggctcctcacatcccagacgatgggcggccaggcagagacgctcctcacttcccagacggggtggcggccgggcagaggctgcaatctccgcactttggggggccaaggcaggcagctgggaggtggaggttgtagccagccgagatcacgccactgcactccagcctgggcaccattgagcactgagttaacgagactccatctgcaatcccggcacctcgggaggccgaggctggcggatcactcgcggttaggagctggagaccagcccggccaacacagcgaaaccccgtctccaccaaaaaaatacgaaaaccagtcaggcgtggcagcgcgcgcctgcaatcgcaggcactgggcaggctgaggcaggagaatcaggcagggaggttgcagtgagccgagatggcagcagcacagtccagctttggctcggcatgagagggagaccgtggaaaggggagaagaggagagaggagagaggggagagaggggacaggggacaggggagaggggagaggggagaggggagaaggccacatttgttcattaaataagatttaaaaccacattttaagtgactgatcagtaattccaatctatttcattttagtcactgaaaaaaccctaatatcctttaattattcaaaaaatattcaaaaaaagtattcttatatttgtgtttctgaaactttcagaaactgtggaccacttaatggatgatgacgtacatggagacaacaaattttctatatgataataggctcatcctagcttttatttttatttttttaaaaattttttgagacagagttttgcttttattgcccaggctggagtgcaatggcgcgatcttggctcactgcaaactccacctcccgggtacaggcaattcttctgcctcagcctcctgagtagctgggattacaggcatgtgccaccatgcctggctaatttgtatttttagtagagatgaggtttctccatgttggtcaggctggtcttgaactcccgaccttaggtgatctgctcaccttggcctcccaatgtgttgggattacaggcgtgggccacctcacctggcctcatcctagcttttaatttaaaaattcaaattatttcaaaagtaaaattaatggcttttttaagtcatgagagggatagatatcattgttagaatccatttaccaaagtgtctatcttaggcttcgtaatgagtactttaaaccaaaaatcaagttctacatactatctaagtgtaaaaagaagtggtttgtaaattcctctttatttctactaagttagaaaattcaaagccaaaatgttaagttaggaataaaaacaagcattggataagagtgtgttgggtataatgattaagagtcaaactcgacatcaagtggttcctgattgcatctcagttctgctatttatgggctgtacgacctgaatgcagtttcttcaccgctatgtgcttgattcttcagctgtacagtgagaataatggtgcctaaatcctaaggttttgttaaaattagagcaagtgatacaaataatgtcccagaagagcatccaacgtatagcaagtgtacagaaattttagctcttatttgtcaattctgttagattgtgatcaatgttaagcctaaaaaccaggtgaccacatcagtggactgtaacttatgttcattctactcagtcagtctgaggctatatagtagtcgaatgtttctaatactatccttggcaaattcttatatattcacatatgtgtgtgtatgtgtttcctgaaaattttaagatgaacaagcactttcttctctggccgaatttcttaaagcttttttctctctttggttttaaaaaagtgttaatatttttggttggcaaatcagagttgtatacatttatggggaacaatatgaagttttatatatgtatataatatggaatcaaaaagtcaagttaaataacatatcaactcaactatcatttttgtgatgagatatttgaaatttagtcattttgaaatatacaatacattatagtttactatagtcacactgctgtacaatagatctcaaaagctatttaacctgtctatttgaaactttgtgccctttgatcaactccctctttccttccttcctttctttctctttctttctttcttttcttttcttctttccttctttcttttttattcctttcttttctttttttttttttttgagatggattcttgctctgttgcccaggctggagtgcattggtgcaatctcagctcactgcaacctccctcttccatattcaactgattatcctgccccagcctcccagatagctgggattataagcatgcaccaccaagcctggccaacgactccctattttcttcccaccacaccactggaacaactggtaaccgttgttccactttctacttttgtgagttaaaatttattagattctacatataaatgaggtcatgcagtattattctttctgtatcaggtttcttccatctagcataatgtcttctgaatttatctatatgtttttgaagaataggattttcctctttttttttttttttttttgagtcaaagtttcactttgtcacccaggctggagtgcagtggcatggtcttggctcactgcaacctccgcctcctgggttcaaacaattcccctgccttggcgtcccaagtagctgggatttacaggtgcccaccaccatgcccggctaattttttgtattttttgtagagacggcgtttcaccatgttggccgggctggtcttaaactcctgacctcatgatccgcctgcctcggcctcccgaagtgctagaattacaggcatgagccaccacacctggccaggattttcctatctttaaggctggatagtattccattgtgtatccatgtcaaattttttaaaaaattaatttaaatatatatttattattggttgaaaaacttgtgttatgaaaggatatttctgtgttaagcatgtattaatgtaattcagcactaaatattaataatagctggtttgtactgagcactaaccataacactatatccatattaatgagttaaattctcccagtaacttaataccacaggtattataattattctcattttacagaggaaccaaaagagccactgagaaaaacaacttgctgacaatagcccaggctggagtttagtggtttgatcttgggtcactgcaacctctacctcccgggttcaaactattctcatgcctcagcctcccaaatatctggtattacagacgtggaacaccatgcctggctaatttttgtatttttagtagaaatggagtttttacatttttgccaggctggtcacaaactcctgactttatgtgatcctcccaccttggcctcccaaattgctgagattacaggcgcgagccaccatgcccagcctaatatgaatgtttcttgaatccagaaaagttatgcaggtagtttcttgtaggttaacataaaagaacaattagcaaaaacatatgaaatggggtaaaattaatcaaaaccacatctttccaataagcggtaataattgctgtgcttttttaaatggctagattactaacaatatgcaaacacaagactttggctttgctcaattattaagtttttgaacattttgatatctgaaatcttggctaaagttctttttttttttttttttttttttttgagatggagtttcgctcttgttgcccaggctggagtacaatggtgcgatcttggctcaccgcaacctctgcctcctgggttcaagcgattctcctgcctcagcctcctgagtagctgggattacaagcatgtgccactatgcctggctaattttttgtatttttagtagagatggagtttctccatgttggtcaggcttgtctcgaactctcaacctcaggtgatccgcccgcctcggcctcccaaactgctgggattacaggcgtgagccactgcgcctggccaaagattttaaaaagaatatttttgaggtggctttttagggtttccatggtaatacaagaagaattttaataggcaggaaaatgcattctacatacacacattgcacttctctgatttgctttaacattgaaagattaaagattgcaaatctagtttctcagtttagagtaaattaacaaaagatttatttttcagctggcaaataattgtataaaactaatggataatagatgccattagctgtcaaaaaatagcatgactagattcagtaagtatctagccatgcaaatgacaatccaataaaattaaaaccctaattggttcatgtggaaagcattgatgtgcagtgtcgtgcacctccactcagcacctccttgggcctgtttacagagataccaatttctccttcgtgactaagggtgaatactggaaacagagtgctgtgttcagagttattactgggaacatggttaacacatttctttcatattataaagacattttatgaatgttactctgcatcacaaaaccttttagtaaaagattgtttatttaagtacttaatttggatttataaaaaatgtcaatattctgggtaagtcacaaacacttaaatctcaatcaaattttataaaacatatttgaataagataaagttttcttagacaagaattgtattttattactaaatttagagacaaatagaaaaccagtactttgggccaaataacagtgtttggcacagaagtactcccaaacaagtgctctccatcatcaccgttaaagtagcaatggcaccacgtgctttcctgaaaccagctggactgttttccactgataaaaagtggagaggacattgaaataatgaaggaagctgatataaatggaatacttatataaaataaaagtaaatacaagtgaaatacttatatgaaatacttttaaaataaaaagtagcatttgatgtttatgactgtagatgaaactgttagtatgagatcctcatatttttacttctcttgacaggataacttgattcacaatgttcttatttcaaataatattttttctgctagatatttgcaagctttcagtcacatagtacctgagctcaacagaaatcaacaaaagaaatattttaccacaagcattttattattgatgcacatgcttattttacttaaaatacattagcttttggtgaaagattatacttttttttcagtgtgttttttattgtccttccaggaaactgctattctcagctctacctgcattgactaatagtgagtaaaagttatgtttgggtaagaagcaaatgtgtcttgtctgcatctcttttttcatttgttggctgaagaaagtataatgcagatagaagattaaagaaaataaaatccctgaaagattatttagaagtcctcttaaccggaaaaaaaaaaagccctcaaggaattgtgatataagtagaaaatatattatcttgctaagcctctaaaatttcagcataaaaggccaggcgcagtggctcacacctgtaatcctagcactttgggaggctgaggtgggtgaatcacgaggtcaggagatcaagaccatcctggctaacacggtgaaaccccgtctctactaaaaatataaaaagttagtcaggtgtggtggcgggcgcctgtagtcccagctactcgggaggctgaggcaagagaatggcgtgaacctgggaggcagaggttgcagtgagcagagatctctccactgcactccagcctgggtgacacagcaagactccgtctcaaaaaaaaaaaaatttcagtgtaaaacctgtattgctttaacaaatatattattccttcagtttttatttttcagaatatgattcaatttcttggtgaatcaaaactgagaggagaataacttatttgttaaggtaaaaaatgtagggaatactcactgcttatggccaacatcttctccacccccaggcccaggcaatcatcattctatgctctgctgttattgatacaggagcacaaaagaaattatttaggcaaattgtgaggataagagagcccttggcaaagcttcccttttaacaagaagcagcccccaactgactttttttcaacaaagagtagcctgtaaaatccagctgcaaatatagataagcaagctagaagcttgcatgggtgaatgtcagcagctgtgccaatgggaaaaggctacctgaggccaagcattttcaacatggaggcaccatattcccttttttgtgaatcacgtgtataaaggaacaggaaacatggcactggccaggtaaaacacccatctgtatagtagaaaattaaagtggggtggccagcttcttcatgcactatgtaaatggtacaccttgtctgaccaatcttttgggccctatgtatatgaaacatcacctcctcaagctcatctgtaaaactccatgcatttcaccacagaactggaagacctgctcgagagcccctctctctctgaaggagacagaggttttatttttcttttgcctattaaacctctgctcttaaactcactcctcatgtgtttgcattcttaattttattgctgtgaggcaatgaacctcaggtattaccccaggtgaatgacactgcttcattgtgggggcttgtccaggattataggaagggtaagtataaaagcaaatgctggccaggtgcactggctcacacctgtaatttcagcactttaggaggccgaggtgggcggatctcctgaggtcaggagtttgagactagcctggccaacatggtgaaaccctgtctctactaaaaatactaaatagccaagcgtggtggtgcatgcctgtaatcctagctacctaggaggctgaggcaggagaattgcttgaacccaggaggcggaggttgcagtgagccaagatcacaccattgcactccagcctgggcgacagagcaagactctatctaaaagcaaaacaaaacacaacaaaaaaaaaacaaaaaaaaccagaccccaactctgtccttttattttgaggctctcacactccattttaaaatcaaataaaaccagaaataccaggtgtcctatggccagctgtacctttagggtgagctgccattctcaagtctcacatgacagacttgctggggagaacataatgaattccccagtgccctcaggttgctgcgaatgttggctatttttcaaactgcttttcatttatggaggacctagccatcacatggggctggaagaggtcctaaagtaattgaggatttcttttctgggccacaccctggttttacctgaaggcgtctggaccgatcccagcctctgactgctcgactggatgttggcaacaggatttccaagctttccctatcacaatttttctccctttcctatctgtgaccaccatgtcttctagcctcttttcgtacgtaatgccgcaggaatttttacagttcaaggaagtaatcctgttaggcaagatcagaaaataccaatagtaactggaaatatagctcacagggttgctggttttgtgaattttttaggagcagagcgtcccaccacagtcaaaaccactgtctttctctccaccttgggccacttcaagggaaaggaaggagactaaaagggtgcctttctctcacttttctttctaggtgggtaacaagccatctttggtctgcactcctcttgagtgcattcagaagcattggcactcctgtaaccccatgagtttggggaaaaaaaaagtggcttattgcacaagggcctgacatttttactagacctttgcaagcactgcaaaatcaacccagctattagcagtcatatcaagcaggtctataggaatgattctccaaaattagagaagcaacttccaggagaaccatctgagggatcccccttattcaggatccactcaagttcccatgtcatgacagaaccttagtcaaaaaagaaaatagtgaatgaaaaaataggagaaacattattctcaattgaaagagagacagtacctcttgagaatcctgattggaaccccaatgatgccacagataaatggaaaatcaaacactttttaatgtgcgtattgaagggcctatggagaactaaggccaatcctcttagttactctaaactgtccatgatagaccagaagctagataagaatcctgcagcctttatgaaaaggctgagagaggctctaataaaacacacctccttatcccctgattcagttaagggacagctaatcctaaagaacaagtttattacaccggcacctcctgatattagaagaaaactgcagaagcaggatataggagcagacagcaccttggagaacctcctgagggtggccaacttagtcttttataatagagaccagaaggaggccccctaaaaagaaagagagcacaaaagaaggacaaacctttagtagctgctttgcatgcttgcaaagtccaggatcccgaaggtgccttcactaattgctacccacgtggcaagccagggcactttgagaaggggtgcccaggcaccaagaggaatccacctcaaccctgtcgagcctgtggcatggtccactggaatcaaactgcccccagaggtggaggtcatcagcttcagaaccagtctcacagatggtccagaaggacttatgggtcctggggctcaaactcctggctccagtggctcaaactgccattacagcacaggatccccaggtgattctgaaaattgaaagaaggaaggtagacctccttcaggaaactggagtcagcctctctcttcttctctctattcttctacccttttcccatagcatgactatgagagacatctcaggaaaaactctaatccaatatttttctcaaccctttagttgcagttaaaaggacctattatttacacatggcttttaaatcatgcctgaaagttacactcctttattaggtagagacattctatctcacatggggaccagcatccttataggcccaggacaaattctttgtctctatctggtagaagataatattaatccagaagtgtgggcaattcaaaggagaataggtcaagctgtaaacatgaggccagtctggatccaacttaaggattccactttctttttttctttttatttctttttttttgatagagttttcactcttgttgcccaggctggagtgcaatggtgcgatctgggctcactgcaacctccgcctctggggttcaagcaattctcctgcctcagcctcccacccaagtagctgggattataggcaggcactgccatgcttgtgtaattttttttttttttttttttttaagtagagacagggtttcaccatgttggccaggctggtttcaaactcctgacctcaagtgatctgctcacctcagtcttccaaagtgctgggattacaggtgtaagccacctcgactggtggattccactttcttttctaatcagaaaaaatatctcctaaagccaaaggataaaaaagggctagaagccattattagtaacctaaaaatctaggccctcctcaaaccctgtaacaccccaatattaggagtgcaaaaatccaatgtgaaatgaaaaacatcaaaaaattaacaggttattatcctcagttttccttccacaaaacatagcagaaatgcactctaaggaatataaaaagaaaacaggaagtagccgaaggaaatagtttagctgatcaggcagttaaatcgcagaaaggaagcttcagggcatcaatacacttcatacccctctaatttggtaaggctctaaaagaaatttggaggcctaatttggttaggcctcagtactctcctgcagagataaaatgggtcattactcaagggtacactttccagccctcagaatagctacagtcaaaggatggcaaactccacttgccagcctccagccaatggaaagtccttaaaaagcttcaccaagcttttcacttgggaaaggataaaacttttcaatatgcccagagattgttttcaggagagaacttattcaaaacagtcaaacaggttgttaaggcttatgaagtctaccttaaagataatctcctcaacaagacagcttcttcctctttgaacccaaagggtgggaagctatgcaagggagatctggcagacaaacttcacccacatgtcaaaaccaaagggcatccaacgccttctggtatgggtggatactttaagggtctttcttttcatgggctatgtaattggcacacttagtcaaaccaatcccctgtaaatcaatcatcacctatgtaaatcaatcactgcctcctcaagccactgtaaaaaatcaatcatgttctgctgcaaatcaaagaccctctcttgggcaacgcacattctcagaatgaggaagcttttcttctctctcttctttctattaaactttctgcttctaaacccactgcttgtgtgtgtttgtgtcccgaattctttttcagtgcaagacaaagaaccatgggtagatgcccagacaacaaagacatttcatttgggggttctcatctgggatcaggatcagaacagaagatagaaacatcagattggtgagtatggagtgaacctcaaatctgtcttttaatctcaaggcttccttcaaaccagttttattcgcagaggtcctaaccatcatgtgaggctgggagaagtctgatgcaactgaggattactgtccagggcacaccgtggcattattcaaaggcttctggactgaacccagcctctgacagcctgtctgagtgttggtaaaggatcttcagctatcctgtcataaaattttcctttctttctatctggtgtcactatgtgtcctattctctctgtgtgtgcaatgtgcaggaagttttacagttcagagaaacacttctgttaggaaagattggcaaacgcctcaggcagtaactcaataagcatctctaacgttcctctagtgagcacatggtatttctaagccaacagtgccacctagtgaaaaatagaaattctcttcgtgagacacattgtcagtcctttaccataacactgcagtttcctattttttgtgctgctagaaaagccccttctgtgaatgggagagctctgccttcaacaattaggagtaaaacattctccatagccaaattttagttctgatactgtcccattagcaggaaaaatcatcgttaggtccctaccttcatttaaggcacctagtctgtctccaattagaacagtacttaattagtaaggagaattttaagtttataagttaagcagaaacacttttctaagggtgaatgttttatcatgagccataatagcaggcaatctagcaattttttttgttaaagaaaccttgcccaaaggccgactattacagtctctgtgaagattcattttttggggagccaggaagatcacacaagtttagaaagtaaaaggggatcacaggtggataagctagggttgcattgctaaagtatggttaatcccatcacttagttcatctggttccatggtttggaaagacacacctacaaccatgggcagcacatttaacacgatgctgggacccaggaaacaagaaaagagaatggttggggagacactcacactgtcttcccctccaacctgggtcacaatgaaagcaggaaaactaaaacgatgtttttatcctcactttttctagatgagcaacagaccatcttcagcttgcacccctctggagtgcactgtgaaacactagaacttctttaacctcaggactttgaagagaaaagcaattcattttcttttgcactagggcatggcatttttactgaacctttgcaagccttgtaaaatcaaccccgctattttaacaggcatatcaggcaggactatagagaacaatcctccagaattagaaaagcaacttccaggggaaccatctgagaactccccttatttggggccacctcaagttctcttcttattacgagaccctagggaagtaaaggaagacttaggccaattttctgacaactccaatacgtttatagaaggttttcagaatttaactcaagtgtatcacctcacatgaaaggatgttatgctgcttctaaaccaaaccccaaccacagctgaaaagcaggcagttctgcaggcagcagagattttcagaaatgagcaacaaatctcctataatacatcaaaagggaagaaaggagatagggaatgtgaagaaatagcagaaacaccatttcaaataggaagtgaagcagttcctcttgacaaccctgactggaactccagtagctctgcgggtgaatggaaaaggagacactttttaatatgcattttagaaggtctggaaagaactaaggccaaatttcttaattgttctaaactgtctatggtagaccaaaagccagatgagaatcctgcagcatttatggaaaggctgagagaggcactaatagagcaaacctccttatccccagattcggtcgagaaacagctcattctaaaggacaagtttgttacacagtcagcttccaatattagaagaaaactacagaagcaagctataggaccaattagcaccttaaagaacctcctgaaggtggccactttggtcttttataatagaaaccaagaggaggaccctgtagtcccagctactcaggaggctgagacaggagaatctcttgaacctgggaggcggaggttgcagtgagctgagattgcaccactgcactccagcctgggccacagagcgagattccatctcaaaaaaaaaaaaatttgtgaattcaatttttttggtattcttggtatgtttttgtggtgattcttgatgcagaagtttataatgtgagtatctacatgctattctgtctatcaaagtgggagctgcaagttagtcttgccttctagtcaccactttccgtctctctcaaaggtggtcttttaacttagctactgtttcttagctataatttctgagttcgaggtggagcccattaagaaatattctatatgcctggactcagtatggataaatctttaaaagggcaagcctactttacctaagcgtctacttctacaaataacttatttaagatatatatatatatatatatttttttttaccttcaaggtgggataatgactaagaaaaaggttggcagattgatttaatttttagtaagcatttagtcttttatttaccttttacgaagattatcttttaaaaaacaataaatatattaaaaatatattaaaaatattaaaatctttttagaagctgctgcacatcagcagtcaagcctagatgaggctaactagggagacttccttttcaaatgcatgtgctaaagtgcagtgttgtttatttggaataccccattgtaattttaaattatctttagtaaaattttcccatttctgtgtttgctgctacaagggcctaatacatatgcatgtaaatgtaggcatacctggaagataaattactcagttcttaaaaaattaagcgttccattcttatcttgaaactttctttggctgatatcattctgataaacttagccaatgattcttttctgcctaaaaaaacacaagaataagaaaccaaggggataaaacacaacaatatctgccaatttacagatgtcaaagtttacactccttgcattattgccatttactaccgatttctacctgacccagcgagatgtcatagacctctaactgaatccaagccagttaattatcagatccaacctgatcctggatccagtccagtttctgtcctgtcttcttaatccaatttgaattctaaattcgctaaaactcagagagttcaaaacacaaatccatgacactttggaatccaagaaagaacttaccatgccccctagttgctgcaagacagcaacgaacacaataagccattgtttggtcacttggtgttcctgggggttgctagaggctacttcagattttgcttctagttcaatctgttaaaaaagccttaaacagaatatatatatatatttgagatggagtttcattcttgtcctccaggctgtagtgcaatgatgcattcttggctcactgcaaccttcgcttctcgggttcaagcaattctcctacctcagtctcccaagtagctgggattacaggcacccaccaccacgcctggctatttgtgtgtgtttgtgtatttttagtagacacagggtttcaccatgttggccaggctggtctcgaactgttgacctcaggtgatccacccgccttggcctcccaaagtgctgtgattacaggcgtgagctaccgtgcccagccaaacaaaataaatttaacagagtttaatcaagcaaaaaattattcactaatttgcagtctggtgagccagagtaggctcagagaaattcccaagcagtcacactgttggaggcatttaaactagaacaatttcactatgaataggggatggataaaataacgctgagacctgttgggctgcattcagaaaaagttaggcattcttagtcgtaggatgagataggagttcaataggattggtatcacaaaatacaggttataaagacccaattgataaaacagaatgcaataaaaaagccagacaaaatccataaaattcaagatggtaatgaaagtgacctgtggtcatcctccttgctgattatacattgattgtaatgcattagcatgttagaagaaactcccactggtgccatgatagtttacaaatgccatggaaatgtccagaagttaaactacatagtctaaaagggggaagaactgtcagttctggaaattgctcactccagtcatggaaaattcataaatatttcaccccttgtttagcatataatcaataaataactataagtatactcaatcaagcagcccatgccatttttctatctataggtagccattcttttacttcttcactttctcaataaacttgcttttactttatagactcaccctaaattctttttgtttgtttgtttgttttttagatggagtcttgctctgtcacccaggctggagtgcagtggcacgatctcggctcactacaacctctgcctcccgggttcaagtgattctcctgcctcagcctcctgagtcactgggactacaggcatgcaccaccatgcccagctaatttttgtattttttagtagagatggggtttctccatgttggccaggatagtctcaatctcttgaccttgtgatccacctgcctcaacctcccaaagtgctgggattaccggcgtgagccactgcgcctggctgactcaccctaaattattttatgtgtgagattcaagaaccctctcttgaggtttggattgtgatcctgttgcgggacgcagaggactagagagactagtatgggtgaataaaggaggatatttattttaaggtacgcactggctcagtggattcacatctaaaaagctgagacttgaacaaagacagagtggggtttttataagtgggcttacaaaagcaaaacaaaagcagttaatcatatagtgcataacctgtggccttgcatagctggtggccttgtagctgcatcaaaagaaaaacaagaactggctaaatacagacatttataaaacatagtcatgcttaagaggcaaaggaaaggagtaacaataaatgaatttgtctttttgtttttcttcaaccttgctctggagtgggggagtttctggagtctattccttggccttggctttttggatagcgttatcttataaccgtccttgaagtgagctgctaggcagaggaaaactagtttctttttctttttaacccttactacaatccctttctggtcacaaaataatggaagaatatttatacacagataaaaaacctgaagtacaggaaagaaaagtgagttacagaaagagctggattaattagagcttggcatttgctttatttagacatgaattagagagttggcctcttttgattggccaaaatttgataactgacacaaaactcagttacactttatttacactttcagttgggtttcagtttaccatctatgaagaaaccctcaggctcaattcaaaacacataaaaaggcagctttaggttaaactttatttaacaaaacagatttaatatgtctgcaaatgcttttcatctctttttgatatttggagactattcatgattttcaacactgactaaaactactgtgcctgaaacaaactctaaccttgatatcatgtgacttatagataaatctgctaaaaagatattttattctgctgaaatttagaaaaatagctgagtacatcttgaagttgtcttttgagttttaaaggagcagagctgctttttaatattctaaagtcagaagcagccatgaggcaattctcagcagcacacatgaaaatcacacacagtgaatgcatctttcactctgaaccaattgttttctccccagtctgcgtgtaaaaatcacctgggggaggcgctttaaaaatcttcccaattcaaattgatacaccccaattaaatcagaattcctggagtggaacctgggcaacagtgttgtttaaatatctcaaggtgacgacagagtacagccaagctcaaagccactgctttaaaccaacactttttagattacctacttgccaattaattctcaaataaataaaaaattgtttgccactaagtcacggtctttcagtcttaccagtattatcaaattacaacttttttcagaaccaaccttgctattggttctgttcgtgattcaacctggttccatcgatactgcacactatgtgcagggcactgtgctaggtgccctggccttggtgattattactgtgagaaaaacattttcttaaatttaaaaaagttgcatgtccccaaaacaaacattacatgtacccaaattaagaaaaaaataaaaatacctatgagtcgcccaaaggttagagcttttttttttttgagacggagtctcgctctgtcgcccaggctggagggcagtggcacgatctcggctcactgcaagctccacctcccgggttcacgccattctcctgcctcagcctcccgagtagctgggactacaggtgcccgccaccacgcctggctaatttttcatattttttagtagagatggggtttcaccgtgttagccaggatggtctcgatctcctgacctcgtgatccgcccgcctcggcctcccaaagtgctgggattacaggcttgagccaccgcacacggccggttagagctttaatactccctctgaatattaacatctgtatgattatgtcctgagtgagtgtgttccaccagaaaacaaataaacaaaaaacaaaatcctgccattattctgagatactcagttagcatttttgtacaaatatgtactatttaatttttttattaatatgtaacatgcatacagaaatacatgcacaaagcatttattcatgcaaaactcaataaattgttacaaaaaatacacttgtgtaataaaaaaataaaactaggcctggtgcagtgtgtcactcctgtaatctttgtattttggaaggccgaggcctgcagatcgcttgaactcaggagtttaagaccagcctgggcaccgtggtgacaccctgtctcttctaaaataaaataccaaaaaacaaccaggcatggttgtgcacacttatggtcctagctcctcgggaagctgaggtgggaggatcatttgaacctgaggggtgggggttgcagtgagccaagatcacacccctgcactttatcctgggtgaaagagtgagaccctgtctcaaaataaaataaaactagcctcatccatgccccaacaattgctttatcctttcttctccaacaatagccataatcagagctaacattatagattaattttgttattattatagaaaatttttaacatgtgcaaaacaaacaaaacacatattgttgaggcttgtcaatagacttgtcatgaagcctcaacaactaatcttgtgccattctggtgtcatccacccttctctacttcagtcagccctggtcaacccattggccaccctccattattttctttaggttttttttttttttttttttttggtgaggtcgagtgtacatacattgaaaggcacaaatcctaactgaaacattttgacagataaatacactcatataacctttatatcttttaagaatgaactgaatattgttctattctagtgatagagcataaaatggaatgatgaattatttttcattctcagataattccttcaggcctttctttcagacaattttgttgtcacaagaggctattttcttggtgatttttttttttaaccattggttcattttgcctgacatcatacaatatgtactattttattttaaacttgtctcatttagcaggtttatgggattcatccaggatgtttgcttcagtagtttgtttctttctatgactgttctcttgtgtgaatgagttacaagttttccatccatttcctagagatggacatttgggtttttttcctgctttaagctattatgactaaaaggtttataaacattatcgtacaaatactttttactatataattttattcctttattagcatagcatttaagtgacacctctttactttttttaatggtttctccgggtattacaatatgcatctttaacatatcacaatctacttaaatactgtactattttaataaatgtaaaatatgaaggccctgctgttaaaaagtttgaagtacctccttctattttttgtgctatttataaattttatgtctatgcattatatatgtcacaatactggtttatgacatttgttaaatagtcataagtcttataaagaaattaagagaaaatgatgttcataaatatttagaggcaaatattttgaggctatgtaaatacactgtttctcttttaaatttacccacaatttttgcattcttcagtacgtggtgtctacagtaattattattgtggtgtcctagttgtgattttctattttgcattatccatctacattaattagtacttggaattctataaaaaagattttcttcctatctctatttatttctatttattttttctagatctgtatggacttatgaatatttcttttattctcagctttataatccaatcctattattatttattttgtttctcatgttgttccagcttgggctgcttgaaagtctttcaggttgacttcctctgacatgtcttcttctgttgttcataaagcacttttttaactttctggcttcacaagatactctaccctaacttgaatgttccactccactgctagaattatctaattttatgaacagtcttgcttccttttattaaagaatagtgcttagaggccgggcgcggtggctcacgcctgtaatcccagcactttgggaggccgaggcaggcggatcacgaggtcaggagatcgagaccatcctggctaacacggtgaaaccccgtctctactaaaaatacaaaaaattagccgggcgtagtggtgggtgcctgtagtcccagctactcagaaggctgaggcagaatggcgtgaacccggaggcagagcttgcagtgagccaagatcgtgccactgcactccagcccgggtgacagagcgagactctgtctgaaaaaaaaaaaaattaaaaaaaaaaaaaagaatagtgcttagaaaccatgatatgagagctaggtgtgctcagtaatactgggatgtcactgcttctgaaacctctcagcaaacagagtttgaaaatttacatattaatatagattcatgtaggaacacctctcctttctctctctctctctctctctctgtctcaattgatatattatgagacatgcatttgtctaaatattcccaaatctggtccagcaccacagggtttgttctagaattctcccccgcttttttttttaacttcagaggaaagcaggcagtaatgaccttatgtatagtgtgtgtttacacacacacaaagacacatacacacacacactaacagaaagagtagttttaaaaattgctaatctttattcttataaacaaacagtactaaccagaatacagtgtttgtgttcagttcttcagtcttgcagtattcaattaaaacagtttttcattttattattattattattattattataatttaagttttagggtacatgtgcacaatgcgcaggttagttacatatgtatacatgtgccatgctggtgtgctgcacccattaacttgtcatttagcattaggtatatcccctaaaacactgtttttcaaagtgatatacatcaagacctttcattccaatcttctgaaatagtgttaggttagataatacatttttagtaaggctaaattctattttttactgcctgcattttatcagaatttcctcaaaatcacggtttcttttttaatttcctgaaaggaaaatttattctttgtgatgtacagttccacgaagtttgacaaccgtctagagtcatgtcctcgtctccacagtaccacacagaactctttattaccctcaaaatcatctaatgcttcccattcgtagttaacttctaccttcatctattctttggcaaccagtgattatggtttagttgctgtcttcctcctcctccccctcccccctcctcctcctcttcctcctcctcctcttccttccttccttctttctttgtctcctcctcctcctcctcctgtagggaggtcttgctatgtttccaggctggtctcaaaatcctgggctcaaacaatcctctcacctcagccccacaaagtgctgagattacagacttgagccatcaagactgcactgattatcaatgcctttaatttctttttctacaacgccataaaattgaatcatataatatgtagccttttggatcctcctttcttcacttaaagaaatgcatttctgactccttcatactgtgatgtgaatcaatagtttctttctgttgacaactgggattctattgtatggataacccacagtttgtttaatcattcacctgcagaaaagtatctggtttacatctagctttttgcaattacaaataaagtagacaataaacatccacaaaaaggttttcactttaacattagttttctctttgctttagtaatgacctaggagtggaatattttggtaacctaataagtgtatgtttaactttataataaaccactgaaccgtttttcaaagttattgcaggagtttatatttctagttctagttgctccaagtcctcgccaggtctaagtctttgtaatttttctctgcatggttgtcattctcatgattgtgtgctatttcattgtggcttatgctttatttttttccattaatattgggaagcccaaaatatataatcaatgtaggaagaaatgtatagaataacttggtataagccttggattctggaaactgacttctagaaatctgctatgcaattagcgctttgcaaacattaaacaaatactttatagtttattctctgtggttctctctctctttcttttttttttttttctttgagagagtttctttctatcacccaggctggagtgcagtggcataatcgcagcttattgcagcctcgacaatccgtgctcaagctattctctcacctcagccttctgagtaactgggagctttccgcgggcagagtggcaggtgccgcgccggaggtggtcatggtggagtgggcgtccctgctcggcgtcctgcctctctggttaccgcctccttcccgcactccgccgggggctagtccccggcaggtgtttggggagagtggtggggtttgctgagtcgcgggcgtcggagggttgtggcccggcggcccctgttccaggggtggccgcgcggacttggtggtggccgtcctgtccgcggcgggaggtgggcggggcaggcctggcgcccttcctcctctttctgccgcccgggagaccagccgaccgctggggagaggtgggaatgaaggtcagtggactcagactcaggccgcaagcgtcacacttggcctcttcccgcggtggccacgttgaccagatgtcggcctcgaaccgacagcctgaaaggtttaaggtccaccaggtggctctagcccgcagcagcaccgcatgtgtccagcagagggtgagatcccgtctaactgcagcctccactttccaggctcgcccaggtgatcctcccatctcggcctcccaagtacctgggactacagggatcttcttcctctgttttttgttttttgttaatttgcttgttttttttgacggtttccatttcatttccacagtactttgagttgctgttttattttttgttgttgttattttctctctctttttaaaatttcttacgctctttgcacactgaagttgctattgttttagatttactttttttttttttttttttttggagtcaggtcttctcactctgtcacccagactggagtgcgggttcgtgatcactgctcactgcagctttgacctccctaattgggacttacagagattgccctccagcctgggtgatggagaccctgtctgaaaaagagaaacagggacagagaccagttaaaaacacacacatacacacacattttttaaaaattaagtacaattaattgttatcttcattaccttttacttctgttcactcccacttattttattgttattattgtttggaataatttttgttattgtttgttattgttactgtttatttacttaattattattattattttgaaacagggcctcattctgtcacctaggctgcagtacagtggtacaatcttggcccactgtggccttaaacttttgggctcaagccatcttcccggcttagcctccctgcaagtagcaggaactacaggcatgtgccaccacgcctggctaatttgtgttttatttatttatttatttattgtagaaatgaggttccaccatgttgcccaggctggtctaggctagtctcaaagtcctgaactcaagtgatccatccaccttggcctcccgaagtgctgggattacaaacatgaaccaccatgccttgctatctatctatctatctatctatctatctatgtatctatctatctatcatctatctatctatgtatctatctatgtatctatctatgtatctatctatctatctatcatctatctatctatctatcatctatctgtctttttagtagacatgtggtctccctatgttgttcaggctctggtcaaatatattttttaactttaattattattattattattttttaatagagatgttgtctcaccaagctgcccaggagaatctcaaactcctgggctcaagctatcctcccaccttggcctcccaaagtgctgggatatagccatgaaccaccacactctgctctatctacctatctattcctttagcagagacacggtctcactatgttgtccaggctctggttatatatatttctttttaaatttcaattattattattattttaatagagatggggtctcgccacctatcccagtatggtctcgaactcatgggctcaagtgatcttccccccttggtctcccaaactcctgggattacaagcgtgagccacctggttatatttttgatgtgttgattctttgcagtttgtgttccagtccagatgcatagtgatagtacagggattgaaaacaaaaattttgacacagatcaatctcacgaacttaccttcctttctagtagctcctaatcaagtgaagtgctcctaatctctggtggttttaaatattgtaggaagcattgccctattttactctgtgcactgaagattttttctagttctggaatacagataaatctagagtctgttcttgatcaatcacaagaaaatcaataaacctttttccttattctacttccctttcttgaaagggagggccttgatttgcgttgctgcctgtagacagctatttgtctaatttttgttgaaactgggagaagactgagcctgacaaggctgcagggctgtgaggccctgcccctcaactaaaaaaaatatttaggggtacatatgcttgtttgttaaatgagcatactgcattctgctggggagtgggttccagtgcatccagtacccacatagcaaatgttgtatctgataggtgatttttcatccctcatccccctcccaccctcctcccttttggagtccctgagtgtgtatgcgctgtttagctccgactaataagtgagaacatgaagtatttgcttttctacgttggagttagttcactgagtgtaatggtctccagctccatccatgttgctgtaaaagacacgaaatcattccttatggctgcaccattggataattttagctttgttattggtctcccttccttccttccttccttccttccttccttccttccttccttccttccttccctccctccctccttctttccttccttccttccttcctccctccctctctttctctctctactttctttcttctttccttcatttttgttttcttttgtttgtttttttatctcagattacacacaccaaaatttatttttttgagacaggatcttactctgcccccctggctgcagtgcagtgggcatgatactagctcactacaacctcaaacctcctgcctcagcctccccagcctcctaagttggggcccagcgtgacgtgtgggtcaccaccttgccaaatcttttttttttttttttaaggaggtggattcaccctccccatgttgctcaggctggttctcaaactcctggcctattttaacatttttttttggtggggcagcgtggggcaactgctgcatagctgttctacatagggaaaatctatttttatgggaaagggggaaggagatacttcttgaaacttccctcttcaaatccagcttctggttgtttaaatgagcatctgttgtgaaatagaaaatattgaaaaataagaacagagataaaaagcacaaaataaagtttctcttgtcatcaccaagggtgtccctttgaccagaaagggaagttttagtactaaatcattcctctccctgaaaccaccattgcaaaattataaccaagacagtgaaaaatatctgacctaacaaactccattttgcttctaaccttcaagctgcccttgctcattcctgggaataggctgaactaactttggaaagaacttagtttatagattatagtttaaaacaaagatgataacaaccctttcccaaaacaaacctccttcttgcctggggactagactgccttcgtaggactaacaaattagtcacaagattaaaaattatggtttaggagtcatgcacctggaggctacaagattctgaccctctctaaactgctcctaagatcagtgcttgagctttttgcacaccagggtctgcacttgatggatcagctgccactactcagattgataaactggttcatatggtcttgtggcctccacccaggaactaaatccgtacaagaagacagcttagactctctatgatttcacttctgacctgaccaatcagcattctcgactcactggccttcccccacccaccaaattattcttaaaatctgtgatccccaaatgctcagggggacagatttgagcaataataaaattccagtctcccacacagcccactctgcatgaattactttctttgttgcaattcccctatcttgataaattcactctgtctaggcagtgggccaggttgggtgattacaacactagaggtgtacggaattccattgagaggcaaaaagtttatctggatatctagtgaccttggcctagggaaactgccttacgcttattataaaacataatgtgggggcaaagggagaggtttccctttggccctctgaagtttcactgagaaatcaactcatcaaaggcagatgaataagagaaaaggcagacacacgtttctgtgcacagagccttcataacgaagaccccaagacagtggggaaattgtgtttaggttttatttatttatttaagacagagtcttgttctgtcacccaggctggagtgcagtggcatcatcttgggtcactgcaacctctgcctcctgggttcaagcagttctccagcctcagcctcccaagtagctgagattacaagctcgtgccaccacacccggctaatttttgtgtttcttagtagagacggggtttcgccaagttgcccaagctggtctcgaactcctgacctcaggtgatccacccacctgttatggcatcaacagcattatataataagtgtagttattttttgagtaccccccttccttctctctctctctgtctctctttaaaataagctcaggcagatctaatccatttccaaagcctgaattcttttttttgtttgtttgtttgttttgagacagagtctcactctgttgcccaggctggagtgcagtcacacgatctcagctcactgcaaactccacctcccaggttcaagcgattctcctgtctcagcctcccaagtagctgggattacaggtgtgtgccaccacacccagctaatttttgtagttttagtagaggtagggttttaccatgttggccaggctggtcttgaactcctaacctcaggtgatctgcctgcctcggcctcccacagtgctgggattacaggcgtgagccaccgtgccccaaagcctgaattcttaatccaacattggatctctatcccaaatcctgtagagaaccagtaagttgatttctggacttggatgcctcatagacattacatattaataatgacccaaccctaaaactgggtttgcttcttcctcattcaactcagctgtgacccagacttactggctcaataaattgtaccactgttcacctaggatactgggagagtttactcaatctgtatctccccatgtcctaaacaacccgtgaccaagtcctgtccattcttcctccaatatgtatctccaaaaacttctctccatttccacaactacccatagccctttgtggagccactggctctttgaaggacatcggagaatttgtttcaggtttgcaggtatgaggccaaagcctgctaacattcctgccccagattttgtgtaaacaaaagtatctctgctgggggcattgagaccatacatacttctaggtttggatgactctcttgaaggatgcatgggaccccacaaaactgacacccccaacaaggtcagacatctgctactgcatggtccaaggcctccaccatagatcaccaccgttgtgagcctaaactgccaagggcaccaactccagggagactgttgggaagccagccttcctctgctaaagttgaaagtcacaggaacctccacccacaaggtccccactgcactctgaagatgtggagaatgagtgggtcagagagaaggcatggaggggagacttcctggccagaatgagtttcctaggctctggccaccccacccgtgtctcagcccacgagacaccactctctctcctcctcttctgtccacaagcccctgaagcccacacactgcaggtgagaaaaccacacagtgtgaatagaatagagcctgacacccttctcatgtgagtgtgtcctgagcacatagacgggaggtttgtttgacggtggcatcattgtttatctgcagctgtatcctagggaagcaattctcctattttctttttttgttttttttgttttgagatggagtctcgctctgtcggccaggctggagtgcagtggtgcaatctcggctcaccacaacctctgcctcctgggtttaagcgattctcctgcttcagcctcccgagtagctgggtctacaggcacgcgccaccatgccggactaatttttgtatttttagtagagaaggggtttcactatgttggccaggctggtctcgaactcctgaccttgttatctgcctgcctccgcctcccaaagtgctgagattacaggtatgaggcatcgtgccaggcaattctcctattttgattgaagggagcaagagctaatttcaggggggagtctatggaaagtccgattctcccacaggctgcagactagaaatgaatatggcttcttgggcagtggggattcaaatgaatatggctttttggacggagggaattcctttggccttcacgttttcgggagcttctctcaaaccctcccttgaggctagagaatagattcccccgacatttcctcaagtgcccgatgtatcctgtcaagcgacccaaggacgacacattgagttaaaaacccccgttggttataactggagattttagattcaggccacacctcactctacgtcacagaatgcgcttttccagaagctaagcagaggagctgggctccagagagaggaaggggctgagaaaagcacaggcggagaaaagacgatttttcttacagggctaaaatgcaggggacttccttatcctgccgacttagagaagcccggccccttgtgatccattgctgaaagccgcctcgtgtttgaaaaacggatccgctcccaacttcagtggaaggacatgacatgtagcacgaggtattctgttccttctgatgtggtctgctcagcggggcctaaggctggagttcgcccacaccaatggctccctctgcatggggttccatcatctctaccctagaacatggtccttggcgaattctggctcttaagtcgctgtccaaaaccccatcccatgctcaggctacccgaatgaccttcgcttgcacctttccagaaacgtttcaaatctatcctccatgcatggccacctaaaaatgcagaagcacagaacactcggtcgccattcacctcactgctttcaggagagaatgctcaaggtctcttgctgactttttttttttaacggagtttcgctcttgtcgcccaggctggagtgcagtggcgcgatctcggctcactgcaacctccgcctcctgggttcaagtgattctcctgcctcagcctcccaagtagctgggatacaggcgcccgccaccacgcccggctaatttttgtatttttagtagagacggggtttcgccaagttggtcaggctagtctcgaactcctgacctcgggtaatccacccgcctcagcctgccaaagtgctaggattacaggcgtgagccactgctcccagtctctttctgaatcttgactctgtgggcaccgcccgttagggaggctcgcgtccctgcccaggggccttcattaaccgaaggggacgtgccacgctgggggtgttcgaggtgtgggaggcctcctctgctggcgtcccacctctccgtttaccgccttctcccatcactccgctgggggctcatcccctgagacggggtccgggagcgtggtggaaatgatcgaggtgtagaggttggagggtcgtggcccagcggcttctgtcccagggggtggcggcgcgggcccgggggtggccatctgggtcccagcccttccttccctgtagcaggggcggacgaggtgcatcctgttccacccctgcacccttctcctccccgcccccctccgggtggaccagcagaccgcgggctgtggtgggaaggtgggcgggcttatgccaccagccgcccccactgcgccgcccacgtctaaggctccagctgggcggaacagtctcaggtctggagcgccacacttggctgtagggtggacccggtgcgccactgcccacggccaccggctggcttctcagtcgggccactgggtcgaccagatgtgggctgcgagccgcgaacattgctcttggccactagctcgaaatactaaaggtcaacctaaatatttaatatcaaacatttaaatatttacgcacggcagtgcctcctaggtccagcggaggggtgtgatcaggcctcgctgtggccttgaacccacgcccctactctcgggctcgcccaagtggccatcccatttctgtcttcagaggagccaggattccagggatcttcctgtgattttttttctagttccacttccattttctttcctcagtactttgagttgtttttccttgttctctgtctcttaacactccttcctgcacattaaagttgctgttttgatttctttctttcgtcttgtttttctttcttttttctgagtgaagtcttctcactctgtcacgcaggttagagtacagttgggtgatcacggctccctgcagcctcgacctccctgggctcaggggttgctcctgtctcagcctcccaagtggctgaaactacagggatcgcttcagcctgggaggtcgaggctgcagtgagccatgattgtgccattgccctacagcctgggtaacagaagaaccctgccagaaagagagagagggggtaaaattaattgggatcttatttaccttttgccttcgttcactccattttaaaaaaaaattaatattgtttgttctttctttgtcacttgttattgtttgtttttattatttatttttatttttagacagggtctcactttgtcacccaggctgcagtataatggcgtgatcttgactcacagcagcctcaacttcccaggttcaagcaatcctctcatttcagcctccccaactccctagtagctgagactacaagcacacaccacctgctggctaaccttattttgtgctttgtacattttatttttgtagagacagggttccaccatgttttctgtgcacgagcaatctgcccaccttggcctcccaaagtgctggaattacaggcgtgagccactgcgcctggcttgctctatcatctatctatctatctatctatctatctatctatctatctatctaaactatctatatctatctatcatatctatctatctatctaaactatctatatctatcttatctatctatcatatctatctatctatctatctatctatctatctatctatctacctacctacctttgtagcagagatgtgttctcactgtggtgtccagggtctgctcatatatatttcttttttaacgttattattatttcatgagatggagtctcattgtgttgcccaggctggagtgcagtggtgggatcttggctcactgcaacctctgcctcctgggtctaagcaattctcccacttcagcctcccaagtagctgggactacaggtgcgtaccactatgcctggctaatttttgtatttttagtagagatggggtttctccatgttggccaagctggtcttgaactcctgacctcaaatgatccactcacctcggcctcccaaagtgctgggattacaggcatgagccaccgtgtccatcccggtcatattttttatgtgttgatttttttcggtttgtgttacagtccaagtgcgtagtgatagtaccgggatagaaaacaaaaatgtcgagacagatcaatctcaggaacctgtttttttttggttggttggttgtttttaggggcacaagccccattgagtgaagtgctcctaatctctggtggttttgaatattgtagaaagcattgcagtatttaactctgtgcactgaagattttttctaattctagaatacagataaatctagatgtatggttctcgatcaatcacaaaagttcaatagcctttttccttattctacttctctttcttgaagggaaggaccttgattcagatttgctgcctacagacagcaatttgtctacattattttctcttctttttcttattgggagggaactgagcctgagaaaactgcagggccatgagctgttagattacttccaatgagaggaaaggaagtgtgtgtgacaacacattcggagagaaatcaggggaggtggcagagcaggaagcaccaggaatctgtctccccacgtaggccaaagggaagctggcaggatctatctgatggagcgatttggcaactctggagtctatgggaggcctgctgctgccagggggaagcctggaagatacattgtaatcagtgccagttcccattagctctttgtttcccacccccaccctctctgtgcccccctcaggccagagtcacagcggtggaaaggcttctaaggagaggtatgtgggaaggttctcctacaagtcaggttctttaagctgagcttattttatttctggtctcatgttcaccagaataaagaagatattccttaatgactcgatggccttagtttattttctgctcacaggtttgagctataaaaaccaatttttcttcatatgcaatacatgaaaactatgtatgtcagaacatgcttctcttagtgtactcttggggatatagtttaaacagcaaataaaatttggcatgtatggaagtttctttttatattatcaagagtacaaatatctatcaaaatctttacctcttatgtctctaatctgtatgaatacaaagagcatgatagttagatctgcacatagatatttataggtagataaacacaaacataaaattatgagtttgtctatgcaaatatttatgtatacaaaataagttcaagagaaaataagttcaagagacattctcctccagcgaaaactgatgttgcagacatagacttacgttcacctatatggctctataccatctcaggctggaacccagctatgcaatgttatgtataaaaatcaacaaagattagcattgagggacacagcccaggaagtaagcgtccagtactgttatgtaaggtttcatggaaagcttggaatttgaaggccctgcttttttcttttcactgtatacctctgttatttatatccaccatttggggcctttcttgatgcttctgcttccccaaattagctaattgtctgattatatttgcctgggctgagctaattggctgattaaaatcacctgagcttagctaattggcttatagaattcacctggtctggatgggtaggaaaggaaaatgaactttgatcttctcttcttctgaggattttttttttttaccaggcataagcacaaatggactctagctagatacaactatgtgaaccattctgggtgtatatgtttcactattcacatatcttatatcgataaatacatatacaaagcaaagcaaaacgaagctaggtaagaggtcatttttattttcattctttccagaccgggtgaatcaaatcagcctattagctcagtggtgatttacccaatccaagccacatattgcatcacgttcttttttttttttttttttttttgacagagtcttgctccaggctggagtgcaatggcgtgagctgggattacaggcgtgtgccacaaagcctggctaatttttgtatttttagtagagatggggtttcaccgtgttggccaggatggtcttgaactcctgccctcttgatccacccacctcggcctccaaaactgctgggataacaggcgtgagccactgcacccggccatattattcttataaatgtgtaaatgttcttgttacctggcactcgagtgtttttaattcaggatctaattaaatccgctcagtggaattctaaccatacagctaggacaagtctgaggtgcctgacaccaggaaccctagcctttctcacatagaagccttagcctggagaataagagccagcattgacatttcagcacatgttcactatcacctggttgaaatatggccagggtccagctttacatgataatgaatgactcccctggccttagtgcatttttatttcctagaagaaagaaactagaaacaatgctttcttcatatatgttaaatgcagcaggttgtatttaaaaacatccttctatatgtgtgattctggatatagtttataagacagttaagattatgcatatgtataaaagtattttttataccactattagaatcaatacctatcaatacttccattttccacatttttattctgtatgaatatacatacaaagctaaatatatttgcatatagatatacataggtagaaaggtaaacaaaaacccatgcaggattatatgagtatgtttatgtgaacatttatgtatacaaagcatgttctgaaaagacattttaaatgctctagtatatactaagaacacaaatgtatactaacttcggtactctatggcacaataacatctcataatgaaacagagccaagcaatgttgtttgtataagtgtaaagaaagcttcaggttcagggaataaatctagacagtaagctgacagtacagctatgtaatgctatatttccaggctagcatttcagactattgctttgtttctcactgtatcaacatgctatttgcattcactatattaggcctgacttgatgaatctgcagtccctatttagacaattgcataattggatctgcctgagtcgagctaactagcttattaaagtcacctggactgagctaattggctgattggattcacctgagctgagctcattgactgattgggttcactgtttctaaagagaatgtgtagaaaaatgacctctgatttacttttattttggggctgttttagaaaaaaatacagattgacatcacctagacatatttacataaccctgtgtgtttgtatatgtttatctatctatctcatatttatatcaaaatctacagagaaatgtgtccaataaaactaacttttttttcagtattgaagtaaatgctcaagttacagcccttggcttttattctcttacccaaaaagtcactacttcagcaaagaaaacaaaaatacaaggttttattcctatgacatatttaaaatgattatttgaatttatgaaagctttaaagacaattattcagcactttcacatttgagtgagagcctttaaactgaggctattttatttctggtcctatgtttaccagaaagagaagggtcacccttgacctggcaatgaatgtttcataacctcagtgcatttttgtttttcagaagtgagcaacaaggaatgatgcttcctttgtgtctgttaaaagcagaaagatgtatgtaagagcatagttccatttttgcactattttttgtatagtttatgggaaagttaagtttatacatctataatagcatctttctatgtcactgtcattatcaatatctatcaatatttccactttatacaacactattcttattttttattgagacaggttctcactctgtcacccaggctggagagcagtggaaccatgtaggttcactacaacctctgtaccctgggttcaagtgatcctcccacttcagcctcccaagtagctgggaccacaggcacatactaccacatctggctctttaagacccttgagctcaagcaatccacccccctcaacctcctgaagtgctaaaattacaggtgtgaaccaccgcacctggtcatacatcattattttttataaatacagatacaaagatggatgcatctgaatatagacatacgtagataaacatacacacacatacaggattatatgactacatctgtgtaaatattaatgtatacacattatgttggccaaaagacattttcaataccctagtatatattataaagatgtagaattaattctctactctgacacaatagtattccagaatgaaacatagacatacaatgttgtttgtttaaatgtaaacaaagcttcccctacatgagagatttgggaagatgatagtacactaatgtaatagtttatgttcagattagcattttatggccctgcttttgttttcaatatatgaatgtgctactctcgtcaaccattgtaattctgccttgaggaattcactgttgatgttttgataattgactgattgagtctatcttcgctaactggctgattggaatcacctgacctaagctaattggctgattttattcacctgggctgagctaattggctaattggattacctgggttgagctaatgaatgattgaaatcacctggagtgacctaatcagctgaatgaattaacctgtcttgagggaaatgagtagtaaaataatgtcttagttttgaggcttctttatgagacacaatcacaaatggaaattacatagacgtatctgcataaccctgtgatttgtatatattaattcatttacatattttatatctgtatctaaatctacaaaaaaactatccaaagaaaacttaaatttcctttcagaatagcagactaatttttagtcacagactttaattttttttctctacctaaaaagttacttctctagccaacaaaataaaacaaaaaaatccccaaattatcatgctatgtcatatattcatacaaaagatcccctgaatttctggaagtttaaagaaaattattcggcatttgcaaatttggggcaaagctggggctaatgtatctctcgtctcagttcactagaatgaaaagggtcattcttgacttggcagtgaatgactctcatggccttagtacattttctgtttacagatgtgagcaacaagggccaattctttcttcatatacattaaatgcagcagaatgtatgtcagagaatacctccatttgtgtactcttgcggatgtagtttaaaaggcaaataggattttatgtgtatggaagtttttttaattgctatcagtagaaatacctatcaatactttcaccttctctctctttattctgtatgaatatgtatagaatgatagataaatctggatatagttatgcataaggagataaacacacatacagaattatatgtttgtctacataaatgttcttgtatgcagaagacttttttgagaggcatttttaatatcccattctgtctggaagatgaagacctagacttactctcacctatatggctccataccatcacagactgaaatacagacatataatgttctgtataagtatcaacaaaactttatgttaaggggcaaagcctgagaaggaagcttccattcctgccaaataagactttatgttgaccttaaaattttagggccctgcttttctactcgctctatgactgtgttgtaggccattttgtgcctgccttgatgctttcgtctttcacatttagctaatgggctattcacactatctccactgagtggattggccaactgaatttgcctggctgagctaattggtttcttgaattcacctggtttgcaggagttgtgaagggaaatgacctctgatatgcttttttcttgaggctttttaaccagatatatggatacatggactttgcatgaacatacacaggggacccattctgtgtgtgtatgtttatttattcactaatcttatatttttatctatatgtacaaaaaaagcccccaagaaaaaaataggtcaggaatacttcgaattttctttccctccaggccagatgaatccaaatagtcaattaactcagtgaagattgatccaatccaagccacacacatcacattattcttataaatgtaaaaatgtccttgtcacctggcacccggttgtttgtaatgtagtgtctcatcaaaccagcttagtgtggttgtaatcatccatttatgaagagccagagatgcctgaaaacattgagcctgacctttctcacaaaaaagctttgacatcaccaaaaaaatttacctttggcattttgcacatgttcactattgtctggttgaaatttggccaggtaccatataccaagatatttgtgttcaatatcacagtctatcttctgaaaacaggcctaatttttttattaccataaaagtcatattacagccacaaagaaaaaaatacaaaaacgtatttttacaacacatgctcagagttaagaacaagagcccttttcgtgatgaaagctttaataggaagaaataagcattctcaaatttgagttatagcctttgaaatggggctaatttatcactggaataaaaagatcattcttgacctggcagtgaatgactcgcatgactttagggcttttctaactcccagaatggagcaataaggatcactgctatatatatatatatatatatatacacacacacacacacacatatatatacacattaaatctaacaggaggtatttcacagtctatctttatttgcatactattctagacataatttacagggcagataagtctatatatatattgaagtttttatattactttctgtatgaatacctcccaatacatctatcttctatgtctttattctatatgaatataggtaccaagatgaatacatctgaatatagacatacatgggtagattttaaaaaacacagaaacagaattatgtgagtatgttaatgaggtaactggctgactgtaaccacctgggcttagctaaatggctatttggaaccacattggtttagataactggctgattgtattcacctgggctgagttaactggcttattggaatcacatgttttgagctaattggccaaatgaatttacatgggctaggctaattgacttattgaaatcaccttgtcttagctagttggctttttagaatcacccaggctgagctaattgactgattagattcacctggactgagctatttggttctttagaatcacataggctgggctaattggctgattgtattcacctgagttgaggtaatttgctgattggaatcacctgccttgagctaattgtctgattggattcacctgtcatgagagagattagtaggaaattaatcactgagtcccatttattttggggtttttttttacaagacatactcacagatgaacattacatagatatatttatacaaccctatgtgttttatatgtttatttacctacatgtcttatatctgtatctaagtctacagagaaaaacatccaagaaactctgaaatttgctttaagcattgtagtctatcttcgagtaataacgcctagattttcttgccttactcaaaaactcacttcttcagccagtaaaagaaatacaatacagataattatattttcatttcccatgggaaaaaaaatcctctacattgatggaagctgtaaagagaatattttagcactttcaaatttgaaggagggattttaagctgagactactttatctctagtcctgtgttcatcagaaaaaaagggtcactttgacctagcaattaatgttttacatggccttattgtatttttatctcctagaagttagaaacaaagaccaaggcttccttcttatatgctaaattcagagagacgcacaaagagcatacctacatttgtgtactaatttagatatagggcagataagcttatacatctatgaaagtatctttgtatattactattatattataaatagtatgattaatattaaactattgtatattactattatctttgtatattactatcagtatatagtatacacttctactctctacatatctgttcttttttttttttttttgaggtggagtcttgctttgttgcccagactggagtgcagtggtgtgatattggctcactgcaacttctgcctcctgggttcaagcaatttttctgcctcagtctcccaagtagctgggactacaggtgcacgccaccacatgcagcaaatttttgcatttttagtagagacagagttttaccatattggccaggctggtctcaaactcctgacctcgtgatctgcccgccttggcctcccaaagtgctgggattataggcgtgagccaccacgcccagcaacatatctgtactttaccaatattgagacaaagataaatacatctggacataaatttgcataggtagttagataaatgaacacacacatactagattatatgagtaaatctatgtaaatatttatgtatatacaggatgttcaccaacagacattttagtaccccactacatactaaaaatgcagatgtggacttactccccaatctctggcacaatagcaatttagaatggaacacagccatacaatgtttgtataaacgttttcaaagcttcgtctctaaaggcaaggtctggaaggtgagctaaccataaagctatgtaaatctttatgtccaggttagcatttcagagtcctgctttgcttctcagtgtatgaacgtgctaatctccttcaccattttgggcctgccttgaagtatccattgtcaccattttgataatttgctgattgggtctaactggcctatgctaattggctgattggaattacctgaactcagctacttggacagttgagttcacctgagctaaactaactgattaaaaatcacctgggcttaaggctgggtgcagtgattcatgcctgtaatcccaccattttaggaggccgaggcagatggatctttttgagtgcagaagttagagacaaaaaaaagaagttcaagaccaggagaccagcctaggtaacatgggataaccccatctctacaagaaatacaaaaattagtcacacatggtggcacatgcctgtggtctcagctactcaggaggctgaggctggagattgctagaacctgggaggcagacattgcagtgagccaagatcgcacaactgcactccagcctgggggacagagtgagaccctgtctcagaaaaagttcacctaggctgagttaattggctgactgaaatgaccagggcttagctaattggctaattagaatcaactggtgtgtcataattgactgataagactcacccaggctcagctaattaatagattgacatcacctttgctgagctaattaattgactgattagaatcattttggctgacctaatcagctaatatgaatcacctgggctgaactaattggctgattgtattcacgcgtgttgagaagcatgagtagggtaatgacttctgacatacttttatttttttccaagacatactcataaatggtcattgcatacacatatttatataaccctgcatgttatataacctacagaagaaagtgtccaaggaaaactaaaattcactgtcagtacagcagtgtatcttcaagttacagacctcgactattcattccctaccaaataaagttgcttctccagccaacaaaacaaaagacaagaatttacttttttttgtcatatgttcaaaaaaaaaaaaaaagaatcacctgaattggtggaagctttaaagaaaagttttcagcatttgcacatttgggttagggcttttcagcagaggctagtttatttttggttctgtgttcactagaataaaaagggttatccttgatttagcgtgaatgactctcatggccttagtgaattttcatctcccagaagtcagcaacaaggactaatgcttactttgtataagttaaatgcagatggatggacgttatagcacgcctccatttgtgtactactctctagacagagtttataggccagaacattgtatacatctatggaattatctttatatatcactatcagtatcaatacctatcaacccttccaccttctacatctttaatttttatgaataaaaatacaaaataaatatatctggatatagatattcataggtagataaacacacatactgaattatataagtacatctatgtaaatatttaggtgtacacaggatgttcacaaaaagacattttcaataccttagtatataatcaggatgtggatacgaacttactaccctactctatgccacaatacaaacccagaattgtacattgtcatacaatgttgtttatataaacataaagcttcactttcaaaggtgaggtctttgaagtaagctgacagcatagcaatttaatgctttatgaccagattagcatttcaggaacctgcctaccttctcagtgtaggaatgtgctgtcacgtctactattttgggcctgacttgatgaatctgcagtcgctatttagataactgtttgattgaatccaagtttgctgagctaattggctgattcttttgcctgggccctgcctgcagaagtcattttgacgtatctatggtcccatcagagatgtgactgtcctcttatgcccagaccctgttcacagtgaagattgtgacatatggcttggcttagcacctaagtgatgtgactctcctattatgcttgggccctgcctacaggggttattgtgacataaagctgagcccagctcctatgttatgtgactctcttcttcttcctgagcccaacctacaggggcaatgtttacatatctctgggctaaacatatctctctgccagttaaacagttttcttctgttcatctctaatggaagtttgtaaatggcactacttagtgaatggaatagctttctaaaagctcaggtgctactgagaagctgacacaggatttcagtgcacttaattctaatcaagcaacaggactcaacctaggaagaaacagctggggaaaagaacctgggcaatgtgacactccatcctgggcactcccattaggggggattgtgacatatctttaaacctatcaactatttgatgtgactctcctgtctcacctgggctttgcccatgggcaagattgtgacatatgtattgggccataacccaggtgttgtgactcatttctcctgcctgataactgctcccagagtggattgtggcatatggttgggttcaacaccaagttggtgttgctcttttgccttggccctgcactcaggagacactgtgccatttcactgggctcagcaccgaggtgatgtgaatctcctgccttgaatctgttcgggggggacattgtgacatatctcagggctcatcaacttacaacatatttgagatgactcttttatctgatgtgggccttgcctattaaagtaattgtgacatatctctgggcccagtacctaggtgacatgactctactctcctgcctggactttgtccacagaagggagagtgattatcactgagcccagcacacaggtcatttaatacttctgcgttggccctgtccacatgttcattgtgatataactctgggcccatgccctaggcaatgtcactctcctctttcgcctgggccctctccttagtggggattgtgacatattacttctcctagcacctaggcgatggaacttcctctcatgcccgggccctgcctatgtgagtgattgaatagatggctagacgcagcctctatattatgccactctcttcttcctgagctctacccacaaaggtattgtaacatctctgaacccctctcctaggtgatttgacgcttctttctgaaccctttcctcaggggctgttgtgacctattactaaacacagcacctaggtgatctgacttttctacactgcttgggttctgcccacaatatagattttaatttatagctgagagccacacctaggtgatgttactctcctatcctgcctgatccctggatacattgtgtattgtgacatatcactgggtccaacagttaggtgatgtgaccctcctgcatgggccctgacaccaggagtattatgggatatctttgattcatcaccttggtgatgtgaccttcctcttctgcctgggacatgctaaaaacggggattgtgacacatccctgtaccagcacctaggcgatgtgaccgttcttttgcccgggccccatatactttgagtattttaacatattgctgggctcaacatccatgggatagtacactcctgcctgggccttgcccacagggagacttgtgacatatctctgcatgcatcacctagatgttgtgactcttcttttctacctgcaccctgccaacaggaaggattgtgacatatcgctgggcttagcaactaggtaatgtgtctctcctgcgtggccttttccacaggggtcattgtgacctatcgctgggcccagcacccaggtaatgtgattcttattgcctgtgccctgctcacagagtaaattgggacatatcactgtgcccaacacccaggtgacatgactctgctgcttgtgccctgctttcaggagaagattgtgacatatctttggccaagcacccaggtgttgtgactttttttttcctgcctgcgtcctgccacagtgaaaattgtgacatatcactggaccagcactcgggatttgacatcccttctcactctctatgcacaggtggtattgtgatgtatagtttggcctagttcacaggtgtgatgattactctcatactttgaaccagctagtaggagagatactgtcttttgtagcttgacttagcaaaacaagagtctgggttatttcctttcacaaaaatcacaggggattatcatgctcttgcctatcacataaagcccttgggtggtacagggtgtcataaaggggcccagcatagaggtgagattgtgtctctcatatgcaaactttgccaaccgttaagatggtcacccttgcatgtggtcagaggccactcatgagatcctaaatctcaagaaaagatgcagtccacggttagaattgtgagagtcacatgcgaatatccagatagaattgggatggtgactcatttctaaactaagcttataggttcattgagcactctcacatctggacccagccaattggagagatgttgatgtgggcttatggccacaggtaagatcgtgggcccataccagcctgaaggtatcagagcagatcgtgactctcacacatatcataaaaagccctcaactggtacagagagtatcctaacgtgactcagcacacaagtgagatcgtgtctgctgtacacatgcccagatgacagtaaagattgtcatccattaacactaacacagcccattgctgaggtcctgaatctcacacccagaagcagttgaaagttggaaaattgactctcatatgtgaatccggtccacaggtgggttggtgactctcagaccaagactcagcactctcgtgaggttgtgactccgctaaggagacaggctgcgggacggattgaggctttcacgcgtggctccagtccactgttgagactgtgaatcacgtacttagactcaacatacaggaggtgtttcctctcatacctgtaattgagaaatgtgcaggattgttaatctcatccctggcctttcatgcaggtgtgattgtgccctcaaaaggcattgtgaaatattggcgggcccagctcaaaggtgatatgaaatatgcctctccagcatttgagttattttacttttctgtgagagcccagtccacagatgggattgtgacattgctagacccaacaactaggtaatgtgactctattctcctgcattggcattgtccaaagaaggcaaataacacattacttgtcttcgcactcaggtgatgactcttctcctgccttggcactgtgcacagggggcattgtgacatatcactgggctctacacccaggttatgtaacttccatgcctgggccctgtgcatagtggccattgtgacatatttcttgctctacaactcagattgtaactattctgccttgccccctgcctgcaaagggcattgtgacacacctctgtgaacatcacaaaggtgatgtgactctcttccaaaatgggattgtggccaggtgcagtggctcatgcctgtaatcccagcactttgggaggctgagtcgaggggatcatctgaggtcaggagttcgaggccagcctggccaacatggtgaaatcccgtctctattaaaaatacaaaaattagccaggtgtggtggtgcacacttgtaatcccagctacttgggaggctgaggcaggagaatcacttgaacccttgaggcagaggttgcagtgagctgagatcacgccattgcactccagcctgggcaacgagagtgaaactctgtctcaaaaaacaaaaaacaaaaaaagctccaaaaaaccaaaatgagattgtgacatatcactggaccgagcaccttggtgatgtgactatcctctcttgcttgagtttcacatattattgttactgtgacatacctctgtgacaaacagctatgggtaggaaaacttctgcctggactcagcccaaggcggcctcatgacttttttaaaagatatgtgactttaaaaatgtgactgtcattttctgcctatgctttgccctcaggaaagattgtggcatattactgaactaagcaacctagtgacgtgtctcttctgactggggcttgcccacagagacaactgtgacatagcactgagcccaggacccaggtgatgtgactctgctgcctgtttccaacattcatgagaggatggtaactatcccttgccaagaactcaggtgatttgactgtcctgccttgttgctgccctcagagaagattgtgatatatcttcagccccaaacccaggtaatgtgacttccctgcttactccctattcagaggagaaattattacatataacctggcccagctcacaggtttgatgacaattctcatacctcaaacaagccaatagaagagatactgtctctctcagcgaggcttaggaaaactggtaaaatacctgtgtctcctctttgtatgaaggtcatagagaactaccacgtgctttgtatatggcataaagctcttgagtggtacagtggtacagagagtgtccacatgtcctaaaacaaaggggatattgtgtttcttgtatacacacccagacacctgttaggattgtcaccctaacacctggatacagaccattggtgaggtcttgtgtctcacatgcagatgcaatccacagtttgattcctgactgtcaaatgtaaacacctgtccaaagttgggatggtgactcatttctaaacccagctcatagacaagtgaggactcttctgtctggcccagttaatccgagaaatattaacttttctacctgggcttagggagcagcataaaggtctcggggcaaattgtggctctcattcctagtctacaatgatcttgggtagtattaaatgtcctaacggggttcagcgcacaggtgagattgtgacagtgatatccacacccaactgacagtaaaacttgccatctttcctcatggatacagcccactgttgaggtgttgaatctcataaccaaaggcagttgaaaattaaaacattgtctctcattggtagacccagtccacaggggggttggtgactctcagaccaaaattcagcacagttatgaggtcgtcactccactaagaaaacggaattcccagaacaaattgagactgtcatgcacaaatccagcccaccactgagattgtgactcatttacttagacccaacatataggaagtgttgactcttatacctagaattgggacatgtgtaagattgttcatcttttcctcagactttcctgcaggagtgatgctgacatgttcctctatttggcatctgagtgatatgactcttgccatggtctagcccacagatggaattgtgatgtgttgctgtacccagcacctaggtgatgtaactccatttttctgccttggcattgctcacaaaaggtattttgacatatctctggggtatgtacccaggtttcatgactctcttgcctgtgccctgtccacaaattgtcatgaaatattgctgggtccaacacccagggatgtaactctcatgcctaggccctgccaacagggggaattgtgacaaatctgtgtcaataacccaggttatgtgactctctttttttgcctggtccctgctcacagagggcattatgacatattgctgaactcagcacctaactgatgtgattctcctttctagtttttgcccacaggggagattgtgacatatcactgggcctcaaactaaggtgaagttacactttcattttcgaactgtactcagaaggcatcgtgacatattcctgggcccagcaccaaggtgatgtgagtctcctgcctgcactttgcccacaaatggcattgtaacatatctttagacctatcaactacttgatatgacttatttttttaaagtgaaagcaagtttattagagaagtaaataaacaaaagaatggctactccatagacagagaagacctcagggctgctcattggctcttttcatggttatttcttgagtacatactaaacaagggatggattatttgtgagttttccagggaaaggatgggcaatttccagaactcagggtgccttccctttttagaccatataggataccttcctaacattgccatgacatttgtaaagtgtcatggtgctgttgggagtgtcttttagcatactgatgcattacatttagtgtataatgagcagtgaggactaacagaggtcactttcattgcagtttttctttcggtgggtttttgctgtcttttgtcctgtatcctcttttatcagcaaggtgtttgtgaatggtaccttgtggtgacctcttgtcttatcctgtgacatagaatgcctgatcttctgagagcacaggaattgggttaattcctttctttttgaggtctccagataactcggggctcttgggcctggcagaaagtgacactccttacttgcacaggtcaggacccctgcgcagggactgtgtagacaaggaagaaggccaattttcccaaagggcttctactagctctacaaatcaagtatgatttctcaaagaccatgattccagtcaaagccttggtaaaataacctgtgtctcccattgtgtcctgttgcaagtgaaaacatgtttattgtacttatgcaaataactatattgccataaatcaagaatattcaccaatatctttgcacattctggacaaatcagggaaagagaaacaaaatactccaaattatgtttacaggagtatatgttactcaattgttaaaagctgtaaataactcaaaagtgctcttgactctgaaaaacaaaggatccacaacattttaagcaaaaagccaaaaaatattacttccatcttttattagttcagttcatgcagtaaactcttgttctgcttgatatttattaatatttcagctttccatgagagtcttgaaagtttttcccctgttctaattttgcagtcttcaaagttatcagaaatttgcatttgaaagcacccatcaatgttccagagcagactataaattatcttttgaaaaggattaaaacaagacaacaattgtctgtgggtgacaaaaaaagtcctaggacagccattattaaagccacagttaactagaaatattggttactcttgtggaataaacaattttacataacaattataactattaacaacatactatacactaagttatatcagacttacaggagttttccataatttcagaacactcactaatgacatatttatacaaatacaaccccaagaaagccaaataccatttcatatttgacaatacattctgtataattttataccaaataaatcgaatatattatttttggactttaggtgacctaatatctaaaagattaattaggtcagaaaagatgaaatgtataatttaattttggaaagtttttcaaataacaaaggtttaaaatattttacattataaaatcaaatcccagttcaccctatgtcattcatttagccaaaacagtaacttttctttttaaaatttttttaaaagccaaaaacttttacttactaataaaggaaagacatagctttccaaacagtctgtctcttgtctttcttcctgtactttattcaaaagacaaacaaaaatctttcattttttaaatacaacatgaaaatctggttcaagagtggaagcctatatttcacctttgtgttagtatagtaatgatgccaaagttcttaataaaatcttatatacaacatatcaaagcttaattagtttgactataaggtaagattctcagaaatcttttacaaccctttaaaatttttgttaaacggcaaatctgtgctctaaaaaaaacctgttgagcttttattccaatgttcaatttatggaaaaactgaatatctatttaactttagccagtatgttcacacacagaatttttttatgagattaaatttttaaaaaccttccacaacttgctcaaaccttcaggtttattctaacttaaaacaaccctttagatctctaaccgaggccccaatattaacattcttatgcctttttataatcttatactgaaagcacattctatttttcttacacaccttgcatgtaaagctgtttttatttcccaaagattacttatgtcacatgaactaaaaggcattcacacatggacacagtgcactggtgaggtcttcaacctcatatgcggatgcagttcagttggaattgtgactgtcatatgtgaacatccagccacaattgggatggtgactcatttctaaacccagcacatagacagttgagaaacttctatctggaccaaatctactgaagagatgttgactctcatgaatgagcttagggtcacaggtacaatcatgggtgcatgctagcacgaaggtctcagagcagattttgactctcatgcataccatataaataccttgaatggtagagagagtgtccccacaaggcccaacacacaggtaacattgtgattatcccatgcacaggtggctaatagtaaagactgtcattcttccacatgaatacagcccactgttgaggttctgaatctcccacccagaggcagtggaaagttggagaattaactctcatacatggatctgatccatagacgagttggtgactctcagactaagactcccaacaacagtgaggttgtgacttcactaagggaacacagttttcaggagagatttagtctcttgtgtacaaattcagtcccctgttgagattgtgactcacatgcttagcccaaacctacaggtgttgactctcatacctggaactggaaagtgtgtgggattaatctcatccctggaccttcctataggtgtgaatctgatatatgcctctgcccagaatctgagtgattctcctgcctgggtccagccttcagcagagatcatgacatatcacttggtgcagcacttagctgatgtaacctattctcctgccttggctctgcccatagaaggcattgtgatgtattgccaggccctgcacccaggttatgtgatttctgcctgtgccctgaccacattggctattttgacatattgcactgtccaacaccaggtgatgttacttttccacctgcgcccttccaacagcggacattataaactgtctctgtgcccatcacttatgtgttctgactttcttctcctgcatggtttctgctcacaggaggaattgggacatatcccagggctcagcacccagttgatgtgactcttcttttttttctatgttctgctcacacaaaagatattgacctattgctgggcccaacaccaaggtgatattactctttcactttagccctaccctcagaaggcatggtgacatattgctgggcccaacgcaaaagagatttgagtcctttgcctggaccctgcttacaagggggcattgtgatatatctctgggcccatagactatttgatctgagtctcctctctttcctgggctttacctagagtaggcattgtgatatatctctgggctctgcacccagctaatttgacttgcctcttctgtctgggccatgactacaggtaagagtgacttatcaggacccagcacacaagtgatgtggttcttctgcctgctctctgcccacaggcatcattgatacatatctgtggtcccaaaatatagataatgtgactctttttttgggtgggaagggacatgtccacagtggggattttgacataatgcttggcacagcatttatgttatttgactctcctcttatggttaggctctacccactggggtaattgtgacatatatctgggtgcagcccctaggttttatggctatcctcttttccatgatccctactcatagcatacattgtgacatatctctgattttctcacctaggttatgtgactttcttgtctttgcccttccattagagggtattgtgacatattgctaggtccattatgtaggtgatgtgactcttcacctgtcccttcacccaaaaggtgaagagagacattgtgaaacatctctgagccaatttcctacataatgtgcctcttctctgctgcctgagaaatgcccccaaaggggattgtgacatatctctgggcccagcacctgaatgttgtgactctcctgcctggactctacctagagaaaatattatgatatgtcacttggccctgcacacaaatgatgttactctcctgcctgggccttacttatagaggggattgagatattttccaggtgaagaattcaggtgatgtcactctcatttctcagcctttctcacaggtaagattgtgacatattactcagcccagcacacagatgaaatttttcctcttgtatgcaaacccagccaacagttgctattgtcaccataacacatgaataaagaccactgttgaggtcctgaatcttatatgtgaacacatcaacagttggaattgtgactgtcttatgtatttctcaccagaagtgggatagtgactcatttctggattcagctcacaggaatggtgataactctcatacctggacgaagccagtaagagagatgttgactctggtagctatgcttaggggtctgggtcttttacttgtaagaaggtaacagaagattatgacacttacacatacggtataaagcttttgggcaatacagagtgccattacagggcccagtccacaggtgagattgtaactctcctatacacacctagccaacagtttgaattgccaccctcacacatagaccgagcccattggtgaggtcctgaatctcacacatgaacctattccaccattgaaattatactgtccggccatggtggccgcgggtggtggttggcgcggctgcgctgcggcccagggcagtgcggagccgggacagtcgcggcgctgacgcccgcgggccccagctgcagatatgaagcggagctgctgccgcgaccgaccgcagcagctgccgcccgaccgccgggaggatggagttcagtgggcagcggagctgtctcagtctttgccgccgcgccggcgagcgccgcccgggaggcagcggctggaggagcggacgggcccacggggcccgagggcaaggagcagccgcctgccttggcctcccaaagtgccgagattgcagcctctgtccggccgccaccccgtctgggaagtgaggagtgtctctgcctggccgcccatcgtctgggatgtgaggagcccctctgcctggctgcccagtctggaaagtgaggagcgtctccgcccggccgccatcccatctaggaagtgaggagcgcctcttcccagccgccatcacatctaggaagtgaggagcgtctctgcccggccgcccatcgtctgagatgtggggagcgcctctgccccgccgccccatctgggatgtgaggagcgcctctgcccggccgagaccccgtctgggaggtgaggagcgtctctgcccggccgccccgtctgagaagtgaggagaccctctgcctggcaaccaccccgtctgagaagtgaggagcccctccgcctggcagctgccccgtctgagaagtgaggagcctctccgcccggcagccaccccatctgggaagtgaggagcgtctccgcccggcagccaccccgtccgggagggaggtgggggggggggtcagcccccggcccggccagccgccccatccgggagggaggtgggggggtcagccccctgcctggccagccgtgccgtccgggagggaggtgggggggtcagcccccccccggccagacgccccctccgggaggtgaggggcgcctctgcccggccgcccctactgggaagtgaggagccccacagcccggccagccaccccgtccgggagggagatgggggggtcagcccccccacccggccagccgccccgtctgggagggaggtgggggggtcagccccccgcctggccagccgccccgtccgggagggaggtgggggggtcagccctccgcccggccagccgccccgtctgggaggtgaggggcgcctctgcccagccgcccctactgggaagtgaggagcccctctgcccggccagctgccccgtccgggagggaggttggggggtcagccccccgcccggccagccgccctgtccgggagggaggtgggggtgtcggccccccgcccggccagccgccccgtccgggagggaggtgggggggtcggccccccgcccggccagccgccccgtccgggagggaggtgggggggggtcagcccccccgcccggccagccgccccgtccgggaggtgaggggcgcctctgcccggccgcccctactgggaagtgaggagccccacaccccggccagccaccccgtccaggagggaggtgggggtgtcagcccccgcccggccagccgccccgtccgggaaggaggtggggggggtcagcccccctgcccggccagccgccccgtccgggagggaggtggggggtcagccccccgcccggccagccgccccgtccgggagggaggtggaggggtgtcagcccccccgcccggccagctgccccgtccgggaggtgaggggcgcctctgcccggccgcccatactgggaagtgaggagcccctctgcccggccagccgccccgtccgggagggaggcggggggggtcagcccccctgcccggccagccgccccgtctgggaggtgaggggtgcctctgcccggccgcccctactgggaagtgaggagcccctctgcccggccagccgccccatccgggagggaggttggggggtcagccccccacccggccagccgccccatccgggaggtgaggggcgcctctgcccggccgcccctactgggaagtgaggagcccctctgcccggccagccgccccgtccgggagggaggtgggggtgtcagcccccgcccggccagccgccccgtccgggagggaggtgggggggtcggccccccgtccggccagccgccccgtccgggagggaggtggggggggtcagcccccctgcccggccagccgccccgtccgggaggtgaggggcgcctctgcccggccgcccctactgggaagtgaggagcccctctgcccggccagccgccccgtccgggagggaggtgggggtgtcagccccccgcccggccagccgccccgtccgggagggaggtgggggggggtcagcccccccgcccggccagccgccccgtccgggaggtgaggggcgcctctgcccggccgcccctactgggaagtgaggagccccacagcccggccagccaccccgtccaggagggaggtgggggtgtcagcccccgcccggccagccgccccgtccgggagggaggtggggggggtcagcccccctgcccggccagccgccccgtccgggagggaggtgggggggtcagccccccgcccggccagccgccccgtccgggagggaggtggaggggtgtcagcccccgcccggccagccgccccgtccgggagggaggtgggggggtgtcagcccccgcccggccagccgccccgtccgggaggtgaggggcgcctctgcccggccgcccctactgggaagtgaggagcccctctgcccggccacgaccccgtctgggaggtgtgcccaacagctcattgagaacgggccaggatgacaatggcggctttgtggaatagaaaggcgggaaaggtggggaaaagattgagaaatcggatggttgctgtgtctgtgtagaaagaagtagacatgggagacttttcattttgttctgcactaagaaaaattcctctgccttgggatcctgttgatctgtgaccttacccccaaccctgtgctctctgaaacatgtgctgtgtccactcagggttaaatggattaagggcggtgcaagatgtgctttgttaaacagatgcttgaaggcagcatgctcgttaagagtcatcaccaatccctaatctcaagtaatcagggacacaaacactgtggaaggccgcagggtcctctgcctaggaaaaccagagacctttgttcacttgtttatctactgaccttccctccactattgtcccatgaccctgccaaatccccctctgtgagatacacccaagaattatcaataaaaaaataaattaaaaaaaaaaaaaaagaaattatactgtcatatatggattcagccacaggttgaatggtgacaaatttctgaactcaactcacttgcacaatgaacccagccaatagaagatgtgttgactcttaggcttagggcaagaggcaaggttttgggtttctcacttgtttgaaggtcacaaaaaattatcaaactcactcatattgtataatgccctcacattgtacagagagtgtcattacataactcagcacaaagtggagattgtgactctcaaatgcacgcccagccaagaataagaattgtgatccacacacacagacagaacccactggtgaggtcttgaatctcactctcagatgagtccacagtttgaatttttaatgtcatgtgtggatccagccacaggtaagagggtgactcatttctgaacccatctaagagacacagtcatgattttcatacctggacccagccaatatgagaggtgttgactctcatacctggacttaggaaaagaggcaagatcatgagtttatacagcactaatgtctcagaggggattgtgactctcacccaaacaatgtaaagccctgtggagttaaagagagtgtcataagaggacccagaacacaactgaaattgtgattcttatatgcacttccagcccacagtaaaaagtgtcaccctcccacatgaatacagaccactgttgagcttctgaattgtacatctggatgcagttgaaaagtggaattctaattctcatttgtggattttgtccacaggtagatgatgacactaggatcagggttcatcacaccggtgaggctttgattctgatagcaggacatggtctgcaggtggaattgggactcttatgcatggattcagtccatcattgagattgtgactcatgtacttgcatgcaatgcacaggaggtgttgactctcctacctgaagctgggacacgtgtggaattgtgcatcttagccctggaccttccacaagtgttgttgtgacatatacttttgcttagcacctgagtaattttactcccctgcctgggcccagccctcagaggggattgtgacagatacctgggtcaaacacctaggtgatgtgactctcatgcttgagccctacccacagagggtgctgtagaatatcactgggctcagcacttaggtcatgtgactcttattttcagccagggccctgcccacagagccattgtgagatatcactgagctcagcacctccgtgatgtgactgtacggcctgtgccctgcccacagtaggtattgtgacttacctctgaactcattacctaggtgatgtgactttcctcttttgcctgcattctgccccttgaaaatggactgtgacataccatttaggtgatatgattctattcttctgcctgagctctggccataggggagattgaatcattttactgagcccagattgcaagtgatgtgaccctctatcctaggccctgcccacaggaggtatcgtgatttatctctgtggccataatttaggtgctgtgactcttctattctctctaggccatgccagttgagggggattgtgacttttctattctctctaggtcatgccaattgagggggatttggaccagcacaaaggtaattaaaaactcctgcctaggccattctcatagaaggcattgtgacatatcactggtcacagcacacaggtaatttaactctccttcctgggccctgcccataggggatactgtaacatatctttagcccagcacttaaaatatgtgactctcaaatggtatttctagttctagatccctgaggaatcaccacactgacttccacaatggttgaactagtttacagtcccaccaacagtgtaaaagtgttcctatttctccatatcctctccagcacctgttgtttcctgactttttaatgatcgccattctaactggtgtgagatggtatctcattgtggttttgatttgcatttctctgatggccagtaaaggattataaatcatgctgctataaagacacatgcacacgtatgtttattgtggcactattcacaatagcaaagacttggaaccaacccaaatgtccaacaatgatagactggattaagaaaatgtggcacatacacaccatggaatactatgcagccattaaaaatgatgagttcatgtcctttgtagggacatggatgaagctggaaacatcattctcagcaaactatcgcaaggacaaaaaaccaaacactgcatgttctcactcataggtgggaattgaacaatgagaacacatggacacaggaaggggaacatcacacaccggggactgttgtggggtgggaggatgggggagggatagcattagaagatacacctaatgctaaatgacgagttaatgggtgcagcacaccaacatggcacatgtatacatatgtaacaaacctgcacattgtgcacatgtaccctaaaacttaaagtataataataataataaaaaaaatgtgactctcctagctggtttcttttccacaggtgagaatttcacatataactgcacccagcacacaggtgaaattgtgacttttgtatgctcatccagccaacagttatgagtgtcattgtctcatatggacagagaacactggtgaggtcctgaatcttgtacacggacatagtccacagttggaattttgactgtcatgtgtagatccagccacaggtgtgatgttgacctgtttatggagttagctcacaggcacagtgagaactctcatatcttgacccaaccaataaaagagatgttgactcttatagctaggcttaaggaaaccaatagggtcctgggtctcctacctgtatgaaagtcacagaagattatgacactcatgcatattgtataaatccctctgggtggtacagagattcattatagggcccagcacacaggtgagattgtgactttgttatgcagacaccgctgacagtaccatcaccctcccatataaacagagcccactggtgaggtcctaaatttcacaaactgacacagttcacagttgggattgtgactgtgatatttaaatctgatcacagatgagaagatgactcacttctggatccagcttagaaaacagtgatggctctttcacctggactcagctaaatggagagatgttgactctgttaactaggtttaggggagcacataatgttctgggtctcctgcttgcataagggtagcagaggattatgacactatacatattgtacaaagtcccccattggtcctgagagggtcattacagggtctggcacacaggtgagactgtgactctgatatgcacacaggcagagtaaggattgtcagcctcctacatggacacagcccactgttgagattctgaatctcacaaccagaagcagtcaaaagttggaattgtgactctcataggtggatgtggtccacagctgagatgatgacctcagaccaggaggcagcacacctggaggctgtgactcctctaccgagatgcagtctgcgggtgtgattgtggctgtcatgcacaaatccagtccacctttgagactgtgactcacttactgagacccaattcacaggaggagttcactctgatacatagagctgggacatgtgtgggattgtaaatcttatcacttaacctttctgcaggtgtgattgtgatatatagctttgcccagcacctgagtaatttaactctcttgtctgagcctggcatacagttaggatcttaacatatacctgggccaagcacctaggtagtgtgacttttttttgggccctgccctcagggataattgttacttatcactaagttcagaacctagtgatgtgacatttctctactgtcttggccctacccacaaaacaaaattacatcactgggcccagcacctaggtaatgtgcctctactctttttcctgggccctgttcatggtgggccttgtgtcacatacatgagccctgctggaaagcatgatgatgattctcatacataaacccagccaaaagatgtgattttttactcacatagtgaggcatagggcaacaaataaggtcttgtgtcccttacttgtacaaaggtcacagaacattataagcccaccgatatgtcatatagtcctaagagagtacagagagtgctgatacaaggcccacttgaagatgagattgtgactctcctatgcacacctcactgaccattagaatcaccacattcaaacatggagagagcccactggtgacctaaattttacatgccgatgcagtctgcagttagagttgtaactgtcatatatgcatttggccacaggtaggatggtgattcattattggacccagctcacaggcatgatgatgaatcttgtatctggaatcagcaaaaaaaaaaaaagatatattaattcacatagctaggcttagggcaaatggtaaggtcctggttcccctacttgtacgaaggtcacagaggattactacacatgcttataatataaaggccttgggtggcacagagagtgtcacagcaggacccagcacacaggtgagattgtggctctcttaaacacacccagccagcagttaggattgtcaccctcaaacaggaacagagcctactggtgaggtctagaatctaaagtggaaacacggtccacagttggaattatgaatgtcatatgtggatctggccacaagttaggtgttgacacatttttgaacccagctcacagtcacagggatgactctcatacctggacccagacaacagaagatatgttgactctcaggcttagggcaatgggtaagatcatgagcttatatcagcactaaggtcttacaggaaatttcaattcttatgcatcctgcataaagccctggggtggtatagattgtgtcataacagggctcaggacaagtgggattgagacccttgtatgcacacgcacccaagagtaagaactgtcaccctctcacatggacacagcccactgttgaggctctgaatcttacattcaggggtattcagaagttggaattgtgattctcataggtggatttgattcacaggtaggttggtgacgggtaggatagttaggattgtatcttcaggccaaaatttatcacacctatgaggcagtgactgaccccactgaaacactgtccagagttggggttggctttctcaggcactgatccagtccatggttaaaaatgtgattcacattcttgaacacaactcacaggagttgactctcatacctcaagctgggacaagtgcgagattgtaaatcttatatctggaccttcccacagggtgattgttacatgtatctttgtcagagaactgatgaattttgctgtcctgcagaagcccattctatagttgagattttgacatacaccttggccaagtaccaagaatatgtgatgctcctgcctgggcgctgccctcaagggggattgtgacatatctccgggccatatgttgtaggttatgtgcctctccaatcctgcttaggctgttcccaaaaaaggcattgcgacatgcctgaacccatcacctaggtgatttgactcttttttttcccctgggccctgccctcagtggggattgtgacatatcactgggtccatcatttccgtgatatgacttttgtgttctgctttgactctgcttgcaggaggattgtgacatataactaggcccagcacctgggtgatgtgactctcatttcctgcctgtattcttccacagaatagattgtgacatatagctgggccaagcacccaggtgatgtgactcctgcgtacagtggccatttttgacacatcttcctgggtcctgtttatgagtggaattgtgacatatctttggccaagcaccaaagtgatgtgactgtctgatttctgctcacaggagctattgtgacatatatctaggccaagtttagaggtgtgtgtaatgatagccctcctatatggacccagtcaataggggagatttggcttctgttttctaggcttagggcaatggataaggttctgggtgaaaaagcataaagttctgggtgaggaaaggtcacaaaagattatgacactcaagcatattctctaaagcccttgtgtgacatttagagtttagttacaggatccagtacccaggtgaaattattactctcgtaggcaaacccagctgacaattaggattgtcaccctcacacatggacagagtccactggtgaggtcctgaatcttacaggcacagtccacaattggatttgtgcctttcatatgtgtcctgggatagctgatatggtgacttatttttggaggtggcttacaagcactgtgatgactgtcataaatatatctgaccaataagagagatgttgacacatacctggtaatagatcattggttcataccagcatgaaggtctcaaagcagattgtgactgttactcacaccatataaagcccttggttagtacagagtgtgtcataacaggtcccaggacacaggtgaaattgtgactttcttatgcacactcagccaacagtaaacattgtcaccctcccacatggaaaccgtccactgttgaggctgtgaacctcacatgtgcaggtagttgaaagttggaattttgactctcatgaatacatctggtccacaggtaagatagtgactcaaagaccaggattcagcatgcctgtgaggctgtgactcatatactgaaaaatttgtgtttagaattgtggctctcatgcaggcatacagtccgctattaagactgtgactcatgaacttatacccaactcacaggaggtcttgactctcatacctggagccagaaaatgtgtgaaagtttaaattttatatctggacctttttgctggtgtgattgtgacatatacctttgtccagcgcttgaattatttgaccctcctgctggggaaaagcccacaaatggaattgtgacatatacctgagcccatcatgtaagttattttactctcctgcataggtcttcaggggagattgtgatacatcactgggcccatcacctaggttaaatgattatcttcttttgcctgggccctgccaacaccaagagttgtggcatataactggacacatcacttaagtaatgtgactctacttttccacctgggccctgcctcagtgtgggttgtgatatatcactgagccctgcactcaaatgatatgactctcctgccttggcccttccaatatgaggcattgtgacatatcaggggcccatcaactaggtattatgactctccttttctgcttgggccctgtacacagggtggattgtgacatattactgtgccctgtacacaggtaatgtaacttttctgcctgaaccctgcccacaggtggcattgtgacatactattaggcccagttcccaggttatgtgattttactgccatggccctgcccagagagtggatattgacatttttttggtccagcattcaggtgatctgattatcttgcctcttcccttctcacaggttaaatttcaacctatgttttttttcccagctcacaggcattatgaccatgctcatatagaaaaccagccactaggagtgattttgactctgttagctagactttgagtagtgggtaaagtcctaagtctcctacatttagaaggataacagaagttgatgaaatgtatgcatattctataaatactttgagtaatacagacagtataataagggcccagcacatagtgagattgtgactctcataggcataccaagccaacaattagggtcatcacttccaaacatgaaagtagcacactggtgaggtcctgaacctcacatgcaggtgcagtccacagttaaaattctgattgtcatatgtggatctgagaacaggttgaatagtgactgatttccagactcagctcagaggcacagtgatgactcgcatacccggatctagccaatacgagatatgttgactctcataggtagccttaaagcaatgggtaaggttctgggccttctacttgtatgaaggtcacagaactcacgcatattgtacgaccccttgggtggtacagagaatgtcataacagatcccagcacaaacttaaaattgtgattcttataggcatacccagccaacggtgagggttgtccctcttacacatcaacagagaccactggtgaggtcctgcacatggcatgtggatgcagtccatggttcacattgtattgttcacacttgtccgtcactgggtgctgggttcatagtatatgcattttgtaaaaacttataaagctgttattttataatatatgtgctttttatgggtgtaaaattaaaaacataatttttgatttttctatttatctcatgtttcttccacaatcaatttttgtcacatactttcctggaaaatagataatttcatctaaattttcaagtttaatgtcatgacatttaaaaaaatattatgtttgaatcttgaatgtatatctaaatatcttcttttatcttttgtaaaatttttactcctcttgaaatagtttatctactttattattgcattcaaagaacagcactaattttattcacgttattatccctgagtaacaaatgagtcagagaagtcgagaaacttgcccaaggttacacaggtactctgagcctgctcttctaaccattgaacacacggtgtcatccaggaaacacacatgcaatactatttctaaaggtccataaaatcacatatacacatgcaaatatgtgtaaagataaaatgaacttatacagtgtttacctgcagaaaagtcactggttgaaagtgtagaaggtcacatagaagaagccttctctgtttttattgttttgttgttttgtagagataaggtcttgttatattgtctaggctgatctcaatttcctcggctaaagcagtcctcctgcttcagactcccaaagtgctctctgccatatttttaaaagtacttattgggtcaagtgtgctggctcatgcctgtaatcacaacattttgggaggccagggggaaaagattgtttgagttcaggagtttaagacaagcctgggcaacatagtgagacctcatctctactaaaaatagaaaaatatagctaggcacggtggctcacacctgtgatgtcatcactttgtaaggctttttcttccatgattaaaaacaaatcttggtatctggcagccgggcacagccaggtaaggtgaggacaggaggcagaaacttgcaatccatgggctacattggctttttgatttttttttctccccaactacacagaaaatttcttcagtgtttgatcttatgcatctttgaatccaaacatctcattctttgccttatacatattaaaatgtattcacagttcataaacataatctataaaaaatattctaaacaaaaaccttctctttatagaacctagtaatgcaccttaattccttacaatttgtgttaagaattactagtctaatgatgttttctaacatgtattaagtacttttagatgtttagcacatgtgatatattataaaaacctcaaaattaacctgggactccaaagaatatgtatggcccaaacagttgttttcttcccaacaccaaggaatggcatacaaggctgtcttcaagttgaggacaggtcataaagacaaataaaaaaaagagaaaaaaatgtctgcaaacttgtttctacacatgggtcttacatgcatttctccatcaattatattaattctgaatgaactaaattacctgaagtggtacaaataattccttcaaattgtagaatccccaggaaacagaaagaagcaaaagcaaactctcccaaagaaagtcacatctattctggaccttgatgaaacttgcaaacaattttccattatgtgcaatgactagcaagcaatcaaatatgacaaagttcacaataaataacatcatgtgaaagacaccagagaaaaacataacagaaacaaatctgcaaagacatccaatattagaattatcagacacaaagaataaaaaacaactatgcttaccatatctaaaaaagacaaatgaaagtatctgcaggaaagaagaaactatataaagattctaaaaatgagttgtaaaatgaataatacagtaactaaaaaactcactacatttgaacttatgtgtacaagacagaaccagtaaactagatgctagatcagtagaaattaacacatatgctacaaatatcagtctcagaaaaatgtctggtaagtattccaagcattcaaaatttaaaactgaaaagcatgaggttgatagtacttaacctttctcaaaaatagaataggtaaaaacactgcacaactcaattcctgagtttatgtcaaagcttgacagagacaaaacaaggacaactataaacaatctcattcacaaagacaaattttttttttgagactgtgtctcactctgttgcccaggctggagtgcaatggcccaatctcagctcactgcaacctccacctcctgggttcaagcaattctcctgcctcaccctcctgagtagctgggattacaggcacatgccagcatgcccggctaatttttgtatttttagtagagacacggttttaccatgttggtcagtctggtctcaacctcctgacctcatgatctgccagccttggcctcccaaagtgctgggattacaggcatgaaccaccgcacccagccaagacaaaaattttttaaaccaattacaaataaagtgactctttctctgtataaaatgaataaaaccaacaataagtttatcttaagagtacaggataagttgaacattgtataatctacatgtctacataaaataggcacacaataagagcttggtaacataactagaaaaaaagaatgctttattttctaaatatacaaggtatttgaagtaaagtacagcaaatgtacataataaactactgaaatcttgtctttcaatgtcataaacaataattatgctggtattcaagatttttattaaacattgcatccatggtttcagccaacaggttaaaatgagaaatcagttacacaattatactggcaaagcggaactagtcaataaactaatagctaacctattggttctacctaggtagattggatccttacaaagcaactaacacaaaaattgtccatatatattgaggatttaaaacttctaggagaggcccggcggggtggctcatgcctgtaattctagcactttgggaagccgaggtggcagatcatgaggtggggagttcgagaacagcctggtcaatatggtgaaaccctgtctctactaataatacaaaaattagccgggagtagtggtgcacgccttgggaggctgaagcagaagaatcgcttgaacctgggtggtggaggttgaagtgagccgagatcactccactgcattccagcctgggtgacagagcgagactctgtctcaaaaacacaaaacaaaacagaacacaaaataaaacttctaggagaacatgaagaagaatattgttattataactgtggggaaaaaaacttcttagacattgcacaatataaaaattatgcataggctgggagtggtggcttgtgcctgtaatcccagcattctttgaggcccaggcaggcagatcacttcaagccgggagttccagaccagccagaccaacatagtaaaaccccatctcaatttaaaacacaaaaatcagcagggtgtgctgcgcatgtttgttatcccagctattcaggaggctgaggcatgaggagcacttgaacccaggaggcaaagattgcagtgagctgagattgcaccattgcactccaccctgggtgatagagtgagactttatctaaaaaaaaaaaaaaaaaccattaaaatatttgtgaattagactataccaattttaagaatttttgattaccaaaaacataaaacatgttttaataaagatggtgaaaagccaaaccataactgggggaaaatagtttaaaaacacatagtacaaaaaattagtatttagaaaatatatattacagaatgtgtatgaataaacaaggaaatggaaaacattaaaaataggacagatggcaagtcttaaagcactaactgatgaaaaatgctaacttcattagtaactatggaataaaagtataaataatgtgtttctaattaaccattttgtcaaaaaattatgtctagcaattccaagagttggtaaaagatatgtactagtaataagtgtagatacatcaaatgaaaaatggtaattgagaatgtcactttcaatgtttgagtatttggacttttggtttaaaaaagtgtaataaaatagagcttttggtaagctttctgtagcttaacattatcataattaggaaaaaacaactttaaaaatgtaaataaacaaaaaagcctacaccaaaataaaacaacaactaagacatattgatccttgttttgggagagtatgaaacagaccattgtgtgaactttatacagttattttgccacactggcatagtaataaaaattatttatattcaatttgaatgaacatgtccacatcttaaaaatactgctttgtactatgaataataaatgtaaaagtctttatactcaagaggatcctgattctcaactaaacatatatggcaacccgttcctctgtttcttcaaaactgaagcctgattaaggcttaaacatggagtgagagggattcataacagaacatgtgaaacaaaaaaacatgagataggatggtcatttctaagaatcagcaattgcctgggggacctcaatataatgatatcaaatatgaatcttactggataaaaataaacacaaaaagctgaaaacaccatgactttaatttggtggaatagagtctctggaattatgcagagttgtgctaaaaatattgagccagaatgatatgtatctaaggattattaaagggaatatttacaaacacattagtatttgttctatatcttgttagagtagcagtactcttgtctgtaatgtcagcttccccaagctacagatgccattgacaaactaagcaagtgtctaaaatgttgtttggagttagtttctaaatttaagaaacttccaataattttatgaatttcattgaactctgtttcatgtataaatctcaccaaaaggcactattcggtacctatttccattagtcttttctgggattttctgttgcttgtttccaaaccaaccttatttgaatcctagtcatttctaaagccccacatgtaataatagaaagagagcagaaatgaagccaagttatcccaaacagtccatgcctaatatattttgttccccaaatgaaccaaaaaccacacaagctacacaacagtggatttaaaattcaacctaaattcaacagtagttgtcaaaatcatatgcaaaaattagcaaagtcacaatgtagaaacccttaacctgttattccacaacaaatcatcaaattcttattttggcatttttagaaaaaataattacattacatatgacaaaatatacccactcacttataataaaatattttgaaatacatacggttttattcttattcttgaatatatattatttagacaagactttcagtaaaaaatacttatagctaccgtgtatgaattaaaacagctatgggaagataggatttttagttaataatgaagattgaagctccaatgatgtaaagtattgtttcctgggcacacagctaattacccaaatcaagctgaaatatgcttgatttaaaaattttaattttcccactgttgacaatattgacataacagctaaatcttagtctcagagctggtagtttggaataaattaagacaagtactattgaggaaggatgggtagtcaagaaagtgactatgtctttgggatgcagcaaacatggccactgtacagtggctgcatattgccaacacaataagccccagcattcacattgtattccagcttattcaagcaaagctctctccaatagagaaaatcccctgtaaagagcatgaagattttgattttacctttcctcaaactgacattttactcattgtaatagtaaaaagcaaacctgtgagtggagatttaagatgctagtgagatgtgaaaaatgaacaagcatgtacagctactgtgtccgtgcatcaagagggccatccagaacatgcttactaataacaccactttccacctctttataaataattatataagactcccataaaaaagtccctagtttcagtctttgctttctcattcttgtaagcaacccaccctgaatcctttctctctcaaggtgtactgggtattctgcacctaacttttaaaatagtcttactcctttgcaataaattactctatgctgcatcttctttgttgtttgtctcttgtttaaatttttttgaagctaagacaactgaggtttcataaaagccattaaacactatcatgctttgttttgtattttttattgtcaaaaattttttctctgatatgtcaatattcacattttaaacacagtcaacactgctaaattgaaaatttaaatgaccacaaaataatttatcataaaagcatgtatatctctcatgtttcaccttcaccacactttctatctattcaactttttaaaaaatttgacggtcaaatacatacatcaaatttaatattttatttaataatatgaattcaattccaaaatgatttatatggaagtatattgttatatttacttttgaccaaatttggctttccaaactaaggtaaaactaaagcatattttcaaagttttaaggaacttaaccttactagcattgagagaagctagctagcatgccttaggtagatagcaagggaagggtttatggagagctcccaacccacaggttagtgccttatccccacataacataaaaatcagcttggaaaaaaaaaataagctccaggcactattaagggaactagcatagggggttgtgcctagactcatgccctcggatgcacaagtaggagaacctaaagcccatttagataaaaatttgcacacacctctggcttacttagaagggaacaaggcctgacatagaaatgtctttgctgtttgtataatcagtgggatcccagaaaaaagttttttctttttattgtgggcgtgaacgcagtgggctttgatgggttctgtggacactttcttttctgtgagtctggtctttataaattattacttcagcccttgattggtcatgggcaaaggtcttaggccaagctctggcttcagcttctaataggttctgggccaacctgagcagcctttatgaatcattacttcagcccctgattggtcccaggccaaggccccaggccaagctgagtcacacattctctaagacagctcataaactaagcacaattttttcccattccagtttataaaaaccctggatcccagccttatagtgggcaacccattgaggcctccctctctgctggagtagggctttcttctctttgcacattaaacttttgctccaacctcacccttgtgtccacattcctaaatcttcttgaatgtagcacaaagaattctgggtattatctcaaacaacagaggttgttacaccttggttcattggcaaaactacaacatattttggtgtgttggccagggagaaaggaattcatcagaagggtgattaggagtgaggctacttgtcctcagttactttctgaggcttcttgtcctaagtttctttttctcaaaaacagctttgaaaacattggctctgttctaatccagtttcctttaatgaagggcctactcattgtgtggaattgaaaggaggtcctagggcaactgaaggttcctggctgagtctatacttcagtgttacctaaaaacccttggactaactccagtccccaacagccaatgagggcgttggcatgagaacttctagtcttttttttcatttcattttcttcttcttttttttgtggctatcatttctcctatccattctttgtatgcaatgttgtgaacgtttttacagcctatggatataatcatactgagtaaagtcagtcagtgtcttagtaatcagatatgtaactcagagttgttgttttgtaatttcctatcaacagggagatttcaaagtctctctctaaatttttacttagtaagggcctttctgtcccccagtaataaacattcatggcactgtatgagagaatatttcaccctgagtaaataccctcctttgcatttggtttgttttttttctctccatgtgaacctcagcattgtccaaggaatctaaacagttcctttatgagacaagttcattttttgttctggagcatatgctataggaacagcctatcaaaccacaaaagtctttctaacttttgcctaaaaatataaagttggagtttttacctagcatttctaattttacagcacccctagttgaatgggattgttctccatgggaagatttgtcaacgctctgtccaaaacttacagttccccaattattttcccttttacatgcctttatcagtgataaggcctcatgccctatttgtaaacagaagaactcaacttctgacagacggaagaaagccatgctaacaaaacaaatcttcaatttttacacatttttaaggcacctgttcctcctcaaactacatttgaatttaaacagaaaaggaattttatgtttgaaagtaaattggtcccattctctgggattctgatcttcctggggccatagcaaaggaagccaaaaatggtattagggcattccctctataaaagtatcttgcccaaatgcaactactgcgtaatctctccccagccattggagtaccttgagagccttttgggctgagtgggcctagaaaaccagcagcatggaaagctaggtgagaaggtgagcataacgtgtcctgctgacaaactcctccggacccatgggggaaggtcatgcttgcatccatgggtaacatctatgatggttgctgggacccagaggaaaaaaaggaaggtcgagaagtggtatgccctttttctatttccttccaccataggccacactgaaaagagaaaggggactgaggaacgccttgtctctcctctttctctagataggtaacaaaccatgtagagtctgcattcccctctagtgcattctgaaacactggaacttcgttaaccctgaaactcgaaagaaaaaatggcttacattctattgcacaaatccatggccatcttagagacaggaggcctagctttctaagggaaacattaatttcaacactatccaacaaatagatatttctttgccctgtgagacaatccagatctttgtaagcattgtaaaattaaatctgccctcttggcagccatatcagacaaacctacaaaatataattaacaaaagtctagatacaaacccttggggaaccctcaaatgcaacttctgggtgctctactggcctcccatattttgggccaccaacacccatgtatcatcagctcctctagttttgccactcaagaaacccacaacattgctgttgccccctacagaaaatgcccagtagacatggtgttactaggattcaagttcccttctcattgcaggaccttaagaaaataaagtgagccccaggaaagttctctaatgaccctgatacatacatagaggctttccaaaatttaacccaagtgtttaatgttacatggagagatgctatgctgcttttaagccaaaccctaactgttaagaaacaagcagcctaacaggcagcaaaaaaactcaaaaacaaacagtaggtttcctatagccagtcagaaaagaaactcagtcaaaagggaaaaaaagtgacagaatccccattcgcagtaagaataacaacaatgccccttaaatatcctaattggagcccttgtgatcctacagagaagtggaaaagaagacactttccgatgtgcatattagaaagcttgcaaagaaccacaatcaatcatgttaattactctaacctgtccctgttaaatcagaaaccagataaaaatcccatggactttttgaaaaggctgagaaaaactttagtaaaacacacctccctgtgttctgattcaataaaaaaggtttattacttaggcagacactaatatcagaaagaagttgctaaaacaggccctgttcaaacatctttctaggttttgtcatccacaagttgaaactttgctgtatttaaacaacactgttttctgtgccccaactgaggaggtctcaggaggcactaaggctttcatcaattttttagctgaaagggaatataggctttcaaaatttaaagctcagctctgtcaaactgcagtaaagtagataggtctagtcagaaggtaccagaacaccaggtaaagaaataattaaactcattttctccttttcctttcccaaaactcttaaatagttggggggatcttagacattactggtttttgagaactctgggtacctgggaatggtgaaatagctaatcttttataccatcttattaaaaaaactgaagcacctaaaaacttactcgctaacttgggaagctaaaactaaaaggcctttaactaactaaaggcagccttacttaaagtgccaaacctcagtcttcccataaggaaggcatttaatctctatgtatcaaaaatgaaatgaatgaccctgggagttttaactaaggttcaaggtccagctaaacaaccagtgggttacctaagcaagaaacctgatttgatggctagaggatggccagcgtgcctctgagcagttttggtggtggcttgcttgtaccaaaggccatgaggttaacaatgggaaataacttaactgtctgcattcccacattggactgctgtcctctaaggaaaacctctggctaataatcacctcctcaaatatcaagttttgctgctaaagtgatctgcagtccagttgaaaatgtgcccttgcctgaaccctgacattttctcctaggggaaactaaagagcctaaacaggattgtaaacaggtagtggtgtaaactggtaaaggaaataataagaatcactgtttatattctctgtgaagttttaattaattaaaaaaaccttttttaaagtgcactcaccttaatgaaaagttaatatccaacctacaagtatattcaaaaagcctttctatttttatctttataaaacctgttttcttggaagaggaattttttctcactcaactaaatttattttctccacttttacttgtcactgttgatgcaagcatagaaggccctaaaataacctctggtggcctgggactcctcaagaaaacaaaaaagccatgacaaattgcattttaaaagaaatatctgctttttttttcatgaaacccctagaattaaaagtaaataagtccctctcaaaatatgtctttttcttctaggtatgcttgcttattaggccctggaaactgtattcctagccctgttctttttttttgtttttactggggacagagtctcactctgtcacctaggccagaggtgcaatggtgcaatcttggctcactgcaacctccgcctcctgggttcaagcaattctcctgcctcagtctccctagtagcttggattacaggcacctgccaccatgcccagctaatttttttgtatttttagtagagacggggtttcaccatgttggccaggctggtctcaaactcctgacctcaggtgatccacccacctcagactcccaaagtgctgggattacaggcataaccactgtgcctggcccctagccctgttcataaaggtcctcaaccggagaccaataatccaattagaaaattggcaaacaaaaaatcttatagttactgaatcttcttctgttagtctagatggttatatacatgttttgtgtgatgtctataaaaaaaaacctctaattaattggcctacaaataagcacttagataaaatattaagacaaaattaaagtctctagtgcttcttggttcacgcaactttaagaaataaaaacattcttgtagaatacaaatatcttacaaatgtaaataggtggtctaaattatgcaggccaaatagcaggtttgctaaatgttttaatgttgtaaactgcttccttggcctttaagaactgtcaaccggccagcttcacaaatagtaaggcctggtgacatataaaactaaccatgcccctaactatactggaagaagtcagactttatctgttcctagcacataattaaaacaacttaccaggttttacattaaagttaaaattacataaagttaccattataacatgtattgagactactaaaaatggatttgcaggcaatgtgtgtaaaaacggtaaaattttttaataaaaaattacaagaaggcataaaaatctacatttttcctaggaataaaagattgtcttaaattaaataaagtgaaagttttaagcaaatttttaaaataccataaaaattaattttgcaaaagaaaacctctgtgtaaacatattagctaaattcaaaggaataccatatggtttttctttcaattaagcatttaaatgaaagcacagcaaagttttctaaagatgctaatctgctctatatcaaaatttctaaaagattatataaaagatttgtaaaaaatcagagatccattccaagatggctgaataggaagagatctggtctgcagctcccagcgtgatcgaggcagaagacgggtgatttctgcatttccaactgaggtacatggctcatctcattgggacttgttggacagtgggtgcagcccacagagggcgagccaaagcagggcaaggcattgcctcacccaggaagcacaagagattggggaattttcctttcctagctaggggaagccgggacagactgtacttggaaaaatgggacactctcgcccaaatactatgcttttcccaaggtcttagcaaccagcagacaaggagattctctcccgtgcctggctcagtgggtcccacgcccaaagagccttgcccgctgctagcacagcagtctgagatcaaacaatgaggtggcagcctggttgggggaggtgtgtctgccactactgaggcttgagtagctaaacaaagtggccaggaagctcgaactgggcagagcccactacagctcagcaaggcctactgcctctgtagactccacttttgtgggcagggcatagttgaacaaaaggcagcagacagcttctgcagacttaaacatccctgtctgacagctctgaagacagcagtggttctccaagcatggcatttgagctctgagaatggacagactgcctcttcaagttgatccctgacacctgtatagcctaactgggagacacttcctagtaggggctgacagacaccacatataggtgggtgcccctctgggatgaagcttccagaggaaagatcaagcagcagtatttgctcttctgcaataattgccattctgcagcctccactggtgatacccaggaaaatagtgtctggagtggacctccagcaacttgcaacaggcctgcagctgagggacctgactgttagaaagaaaactaacaaacagaaagaaatagaagcaacatcaacaaaaaggacatccacaccaaaaccccacctgtaggtcaccaacatcaaagaccaaaggtagataaaaccacaaagatggggagaaaccagagcagaaaagctgaaaattctaaaaaccggggcatcttttctcctccaaaggatcacagctcctcaccagcaatggaacaaagttgaatggagaatgactttgatgagttgacagaagttaggcttctgaaggtcggtagtaacaaacttctctgagctaaaggagcatgttcaaacccattgcaaagaagctaaaaaccttgaaaaaaggggagatgaatggctaactagaataaacggtgaagagaagatcttaaatgacctgatggagctgaaaaccatggcacgacaacttcgtgatgcatgcacaagcttcaatagccaatttgatcaagtggaagaaagggtatcagtgattgaagatcaaattaatgacataaagtgagaagacaaagttagagaaaaaaagagtaaaaagaaatgaacaaagcctccaagaaatatgggactatgtgaaaagaccaaatctacatttgatagatgtacctaaaagtgatggggagaatggaaccaagttggaaagcactcttcaggatattatccaggagaacttccccaacctaccaaggcaggccaacattcaaattcaggaaatatagagaacaccacaaagatactccttgagaagagcaaccccaagacacataatagtcagattcaccaaggttgaaatgaggaaaaaatgtaaagggtagccaaagagaaaggtcaggttacctacaaagggaagcacatcagactaacagtggatttctcggcagaaatcctacaagccagaagagagtgggggccaatattcaacaatcttaaaggaaagatttttcaacccagaatttcatatccagccaaactaagcttcataagtgaaggagaaataaaatcctttacagacaagcaaatgctgagagattttgtcaccaccaggcctgccctaaaagagctcctgaaggaagcactaaaaatggaaagaaacaactggtatcagccactgcaaaaacatgtcaaattgtaaagaccaccaatgctatgaagaaaccctcaattaacaggcaaaataaccagctaacatcataatgacaggatcaaattcacacataataatattaaccttaaatgtaaatgggctaaatgctccaattaaaagacacagactggcaaactggatacagagtcaagacccatctgtgtgctgtattcaggagacccatcttacatgcaaagacacagacaggctcagaataaagggatggaggaagatctaccaagcaaatggaaaggaaaaaaagcaggggttgcaatcctagtctctgataaaacagactttaaaccaacaaagatcaaaagagacaaagaaagccattacataatggtaaagggatcaatgcaacaagaagagctaactatcctaaatatatatgcacccaatacaggagcacccagattcataaagcaagtcaccagagacctacaaagagacttagactcccacacaataataatgggagactttaacaccgtactgtcaatatcagacagatcaacgagacagaaagctaacaagtatatccaggacttgaacttagctctgcagcaagcagacctaatagacatctacagaactatccaccccaaatcaacagaatatacattcttctcagcaccaccttgcacttattctaaaattgaccacataattggaaataaagcactcctcagcaaatgtaaaagaacagaaatcacaacaaactatctctcagaccacagtgcaatcaaattagacctcaggattaagaaactcactcaaaaccacacaacatggaaactgaacaacctgctcctgaatgactactaggtaaataacaaaacaaagccagaaataaagattttctttgaaaccaatgagaacaaagacacaacataccagaatctctgggacatatttaaagcagtgtgtagagggaaatttatagcactatatgcccacagagaaagcaggaaagatctaaaattgacatcctacaatcaaaattaaaagaactagagaagcaagagcaagcaaattcaaaaactagcagaaggcaagaaataactaagatcagagcagaacagaaagagatagagacacaaaaaacccttcaaaaaatcagtgaatccaggagctgtgttttgaagacatcaataaaattgataaaccactagcaagactaataaagaaaaaaagagagaagaatcaaatagacgcaataaaaaatgattaaggggatatcaccacctatcccacagaaatataaactaccatcagagaatattataaatgcctctaagcaaataaactagaaatatagaagaaatggatgaattcctggacacatacaccctcccaagactaaaccaggaagaagttgaatctctgaatagaccaataacaggatctgaaattgaggcaataattaacagcctatcaaccaaaaaaagtccaggaccagatggattcacagcagaattctaccagaggtacaaagaggagatgataccattccttctgaaactattccaatcaatagaaaaagagggaagcctccctaactcattgtatgaggccagcatcatcctgataccaaagcttggcagagacacaacaaaaaaagagaattttagaacaatatctgtgataaacattgatgtgaaaatcctcaataaaatactggcaaacccaatccagcagcacattgaaaagcttatccaccataatcaagtcagcttcatccctgggatgcaaggctggttcaatatacacaaatcaataaatgtaatccatcacataaacagaaacaatgacaaaaaccacatgattatgtcaacagatgcagcaaaggcctccaacaaaattcaacagcccctcatgctaaaaactctcaataaagtaggtattgatggaatgtttctcaaaataataagagctatttatgacaaacccacagccagtatcatactgaatgggcaaaaactggaagcattccctttgaaaactggcacaaggcaggaatgccctctctcaccactcctattcaataaagtgttgaacgttctggccaggtcaatcaggcaagagaaagaaataaagtgtattcaattaggaaaagaggaagtcaaattgcccctgtttgcagatgacatgattgtatatttagaaaaccccattgtctcagcccaaaatctccttaagctgataagcaacttcagcaaattctcaggatacaaaatcaatgtgcaaaaatcacaagcattcctatacaccaccaacaaacaaacagaaagccaaatcatcagtgaactcccattcacaattgctacaaacagaataaaatattgaggaatacaactgcgagggaatgtgaaggacctcttcaaggagaactacaaaccactgctcaatgaaataaaagaagacacaaacaaatggaataacattccatgctcatggataggaagaatcaatatcgtgaaaatggccatactgcccaaggtaatttatagattcaatgccatcccaatcaagctaccattgactttcttcacagaattgaaaaaaactacttcaaagttcacatggaaccaaaaaagagcccatattgccaagacaatcctaaccaaaaagaacaaagctggaggcatcacactacctgacttcaaactatacttcaaggctacaataaccaaaacagcatggtactggtatcagacagatatattgaccaatggaccagaacagaggcctcagaaataacgccacacatctacaatcatctgatctttgacaaacctgacaaaaacaagaaatggggaaaggattccttatttaataaatggtgctgggaaaactggctagccatatgtagacagctgaaactggatcccttccttatactttatacaaaaattaattcaagatggattaaagacttaaatgttagaaataaaaccataaaaaccctagaggaaaaccaaggcaataccattcaggacataggcatggccaaggacttcacgactaaaacaccaaaagcaatggcagcaaaagccaaaatagacaaatgggatctaataaactaaagagcttctgcacagcaaaagaaactgtcatcagagtgaaaaggcaacctacagaatgggagaaaattttcgcaatctacccatctgacaaagggctaacatctagaatctacaaagaactcaaacaaatttacaagaaaaaagcaaacaaccccatctgaaagtgggcaaaggatatgaacagacacctctcaaaagaagacatttatgcagccaacagacacatgaaaaaatgctcatcatcacttgtcatcagagaaatgcaaatcgaaaccacaatgagataccatctcatgccaattagaatggtgatcattaaaaagtcaggaaacaacaggtgctggagaggatgtggagaaataggaacacttttacattgttggggggactgtaaactagttcaaccattgtggaagtcagtgtggcgattcctcagggatctagaactagaaataccttttgacccagccatcccattactgggtatacacccaaaggattataaatcatgctactataaagacacgtgcatacatatgtttattgcagcactattcacaatagcaaagacttggaagcaacctaaatgtccatcaatgatagactggattaagaaaatgtggcacataacacaccatggaacactatgcagccgtaaaaaaggatgagtccatgtcctttgcagggacatggatgaagctggaaaccataattctcagcaaactatcacaaagacagaaaaccaaacacagcatgttctcactcataggtgggaatttaacaatgagaacacttggacacagggtggggaacatcacacactggggcctgttggggggtagggccctgggggagagagagcattaggagaaatagctaatgtaaatgattagttgataggtgcagcaaaccaacatggcacatgtacatctatgtatcaaacctgcatgttgtgtacatgtaccctaaagtataataataataattaaaaagatttgtaaaaatctcatttcatggtcaaactggttaagattaaatagaattgtctataatttcattaaaattgcagttaacattaatagtcaactaatgcaagggtaaaatttggctttctctttttaacaggatttttatgtaatagtaagggctaataaaaggtttttgctttttcaaatttttaattcttcatgttggttaaacaaataacttatgataatctaaaattctattctgtaagattaactgttttatacctgtaacatatttaacgagctccccaaaatcaaacttctgtttcaaggttgtcttttctgagtcctggctttttggtgctacaaagagtccctaaagcattcaaaagaatggcaaacagaattatttaatatgtttaggaacatgggattgtcaaaatgatgtctaatttttttcagtttatatttgagtatataatattaacatatgttccaaaaccagctacgcatggtggctcacgcctgtaatcccagcactttgggaggctgaggcgggcagatcacctgaggtcaggagttcgagaccagcctgaccaacatggagaaaccctgtctctactaaaaataaagaattagctgggtgtggtgacacatgcctgtaatcccagctactcgggaagctgaggcaggagaatcgcttgaacccaggaggcggagattgcggtgagccaagatcacgccattgcactccagcctgggcaacaagagtgaaactccctctaaaaaaaaaaaaaaaaaaatgttccaaaaccatatggggtgtctaaggttctaatgtctaaatatgtgctatcaatcaaaattaagtttgttatgttgggttattgtaaactacaaagataaccaaatttttttgtccatcatgtttctaactgtaaccctggacattttgtcattggcagacaattttcttgttttaatcctcttaaaaaatgatttataatcagctgtggaactttaacaggtgctctcaaacacagatttctgataacataaaagtacagaactcataaaaagctaaaatgtttatggatatcaagcagaaccaagttaatagaatggatttagctaatagaaaactaaagcaatgtttttaactttcacttaaaacattgctaatttttattttgtttttcagagtcagaaaaactttcttaaaagttttaaaaaccgagcaaggtgtactgctgtaaacataatttggaccatgtctgtttctctttgccttgttctcctaaaaatcaaaaactagttataagtattcttaacttaaaacaatatagttgtttgcatcagtgaaacaaaaattcattttctttttttctgagacatagtctcattctgtctgtggctgatgtgcagtgccacaatctcagctcactgcaaccttgcctcccgggttcaagtgagtctcctgcctcagcctcctgagtagctgggactacaggcatgcaacaccacagccagctaatttttgtatttttagtagagatgggatttcaccatggtggccaggatggtctcaatctcttgacctcgtgatcttcccacctcagcacagccagctaatttttgtatttttagtagagatggggtttcaccatgttggccaggatggtctcaatctcttgacctcgtgatcttcccacctcaacctcccagagtgctgggattacaggcatgagccaccgtgcccagctgaaaaatccactttcttatgcaatgaaacacaatagaaaaatgctagttgttttaccaaggctttaatggaagggtatgttttttttgtttttttgtttttttaagaaatcaagtttaagttgcaaagccaaacctcttgggaaagctggtctcatacctgtagtctacacagtcttcatacagaattcctggcctgtggtgagtaaaaaatgtcactttctaacaggctcagaaacactatgatcttggaacctcaaaaatacaggagtttactcaactcacaggtatttaagggtacaaatccatggcttggcccagctttaaaaagtcttatctaagatttcttttggaacagagtttcatcaaagcctatcaaaaaggcctatgtagaggtagttattcttgctgcactgtgatcagtcaggccaagtataatactaaagtttattttgcaaacaattcagtctattttgagttgtttttaacaaaataaaatctaaaaaaaaaaattatctttcaaaacttaccatacatttctcatgaacttctagtctcattgattgttttagagtttttgatgacgttttaaactaacactgcttattcctgtaaaccaaccagcaatctctgcctgcagctcagaaaacagaaagggatgggtcatgtaaaaatctaaatcaatattctagttctaagcaattattctgcaaatcctgctgggtgatgaaaataaataaggtgccaataacccagatgcttcttttatcagaaagtaagatcaagggagctaaccaaagccaaacctcatgcacccaaatcttagcaaacataactatagctaccaggtatcagggtgtgtcagcagcctcaacatttttaggcttttcctactccccttgtttcatttcaatgcatgttctctactaaaccagattgtttcttttttcctaaaaactgtcgagctccaagtggtaatgcaaatggaatgatgcatatacacacgtttcttccaaggacccttaaaccaaccctggaagaaatcctagctgctgttttctacacagcacccctctccagtgaggaatagccaaaaatatcaatgcctattttccctaacagcagttagggtctccactcctgaggggggactgagagggattagctagctagcctaaggtagatagcaagggaagggtctccagagagtccccaacccatgagtcagtaaccacatacccaccaagccgggcattatggcacactcctgtaatcccagtgactcaggaggctgaggcatgagaattgcttgaacctgggaggtggaggttgcagtgaactgagatcataccatttcattccagcctgggcaacagagggagactcagtctcaagaaaaaaaaaaaaaacctcatcttttatcaatattttaatagttttatgtctgagcacttaagcttcaaggacaggacactgaatgatgataagtgcatatttaaatttataaagtaaaagatgaccatcagagtctaataagtgatgaatacagcaacatcatacttcacaaaatcattccgggtatgtttgacaaacaagaaggttgcataggaccttcttgtgctattcatgtgaagtgctcttctctctcactttagtctcaattcccaaccttacagctaccacatactcacatacacagaataagaaaaattaacttattttcttagaaagctgtgattcacattttattctattacatcttttccacattgctgttacaatactgttgaagtgcaccttctttcaccagaagaatacttttgtgaacgtgaatagactgacactggagaagaccagctcagcaaactcacttgaacgatccctttgcttttcaggcagtaaaaatgccttcgaggagtgaaaataaagtgactgcggattaagcagacagttatacatggaaaaacatttgtcaattgtttgaagattacattgcatggtctacaacttttaaaatataaaatgcataacataaatactgcaaaagaaaatagaataaaaatgatgtagttgaccacaaaggacagcaaagctgtattatagcaatatagaaaaatatatatctggccgggcgcagtggctcacgcctgtaatcccagcactttgggaggccgaggcgggcggatcacaaggtcaggagattgagaccatcctggctaacacagtgaaaccccatctctactaaaaatacaaaaaattagccggcgaggtggcgggcgcctgtagtcccagctactcaggagggtgaggcaggagaatggcgtgaaccccgggggcggagcctgcagtgagccgagatcgcggcactgcactccagcctgggcgacagcgagactccgtctcaaagaaaaaaaaaaaaaagaaaagaaaaatatatatctactgccagaaggtaacttgaagtatttgagagatgttctctaagaatctaacaatatttttagttttagattctgtaaaaaatttaagcatttttaattttcaaaaaaatttgagtgcattttttgtcagcttagttttcctgaagaatttaaatataatagagtaaaataatacatattaaaaatgatttttctggtaatagagcagtttaatttttagattaaaaaagtaaaattttacaaaattatatgctgaccagtttaatcagaagcttctttcttacaactgggagaaatgacacaaagactcaacttttatgtcaggtgggagagaaaatgattactaggggctagaaaattgttgtttcactaatcaatgttgatttttattgctattttgtctcaaattatgttaataataaagtaatggccttgatccaaaaaaattttttaaaacttattttttcaatcagccaaaatattaaccaaaaggataaaggtatttaagtcataatttatagtataaaattaaaatgtttctagaaatataaaaggaaaaaagatatataaaaaataagaaaaggaaaaaagtggattactcacaatagctaaggtatgaaatcaacctaagtgtccatcaacaggtgaataatttttaaaaagtggtatatttacacaatggaatgctctttattccttaaaaagaaagaagtcttggaggtgggctcagcagtctgtgtcttagcaagccttgcagaaattctgatgcacactgaagtttgagcgtcactggaatggatagtgtccaaatgattgctgggtcaccccacctatcctgaatgtcaggaacatcctgagtgagaccagtcagtacattgtagctctttctccagccacaaccagaaagtctttgcttcccctttgccttccatgattgttagtttcctgaagcctctgcagctgtgcgaaactagaaaaagatgcacacccaaaagccccatttgaaacttctagacagaaagccaagcatttggagagtctctttgaacagttttaaacacaattgcggaaaagaaagcaactctactcagtgtgaagatgatgagaatgaagacctttatgatgatctacttccacttaataaatagtgactttagaatccttaacacagcactcagctaccaagccaatgaataagattttgcatcacagttgaaatctgttctccactccttttgtagatgttctgaattggttaccagaagccaattgtctcattattaagatggcttctaaactgattcatttttgtgatacataatgactgttagttgaggtctagttgtatggtaaaaaatgctgatgaagaatgttgtctacagagaggatagtcaactaaaattaactgtgagctatgctaaggagctatacttaattcgttcagactttatttggccaggtttttttttatatttcaaagaagaaaatttttttaaaaaagtctttatttgcaacaacattgatgaacctggaaaataagccagcaataagccagcacacacacaaaacaatagcaaattatctcacttctatgtagagtattaaaaaattcaaactcactccaggtgtgaagtggcggccttgtgtgtgatctttctgccctccccaagtttgcattttcgacattaaagtctactttttaattaaaagttttaaattggagaataaaaaaaattgatactcataaaagcaaagagtagaatgatgattgcctgaagctggaggtggaggagatgttggtcaaaagtaatgagtctttcctacatctcttaccttaacaaataagttattcttctctttttttaaatcaccagggaattgaatatttcctgaagaattaaaactgaaagaataatatatatttattaaagcaatgcaggttgtatactgaaatttcagaggcttagtaaaataatatatattctgctaaaatcaccatttcctttttttctgattaagaggacttttttatgacctttcagggattatgttttctttcactttctatctgcattctctttcttcagccaactgattaaaaaaagatgcagagaagatacattttcttctcatccacacatcacttccactttctattagtcaatgtgagtagagctgagaatagctgttttctagcatgacagcaatttctcagaaataaaaacactctgaaacaaaactataaatctttcatcaaaagttaatgtattttaagcaaaataagcatatgcatcaataataaaatgcttgtggtagaatcgatttattttgttgatttctattgagttcagataagatttgaccaaaagctagcaaatatagagcagaaaaaagaatattatctgaaatcagaatatggtaaatgaagttaatttgtcaatagaaataagaatattatgacctcatgctaatagtctcatctaaagttgtacaacaccaaatgctacgttttattatagactgtattttacataagtattcaatttatatcatcctctttcactatttcaatgccttctccactttgtatcagtggaaaacaggccagctacttccaagaaagcaggcaatgctcttcttactttaacaatgatgatgaagagcacttgtttcagtgatgctcccatgccaaaaactgttattttggcggaagtactagttttctatttttctctatatttattaataataaaattcttaaccaagaggaatttatctcattcaagttttaaggaattttgtttacatttaagtgtctctgactttcctggaatattgaaatttttatgaatctaagttgagtactataaataaacaatcttttactaaaatactttttgaagtggggtgatatttataaaaacttttcataacattgaagatatgttttaaccatgttcccagtaatcactctgaacatagaattttcaattttcactgagtcactcaggggaaattgatatctttacaaatgggcaaaaaaaaaaggtgctgagtggaggtgcaacacattgcacatcaatgcttttcacatgcaactattagggtcttaatttaattgaactgtcatttgcatagctagacacttactgaatctagtcatactattttttggcaactagtgccatgtttgtcacctattagttttatacacttatttgcttgactgaaaaaaataaatcttcttttaacttactctaaattgagagactagatttacattctggagctataatagaagttgaatgtttttaatactatttttggcaaattctcatatattcacatataaattttatgaaaagatagggagttgacaaaaagtaaaaaaattcaaatacgttaagcaattttgagatctattgcacagcagggtaactatagtaaactataaaatattgtatatttcaaaatagtaaattttaaatgtactaccacaaaaatgataggtaagcaagttcacagatatgttattaaactaattattccatattttataaatatactaaaacatcacatcgtagcccataaatttatgcatctgtgatttgtcaatcaaaaatactactactttttttatgagagtgaaataagctttaagatattgcaccagagaaaaatgtgtttgttcatcttaaaattttagaaagcgtatacatacatattttttatttcaaatggcttgctcatttactgatgtacgtaaacttttaatatcatgaacagtcagaacccagcactcagaaatagactgttgatttttagtgttcaaaataatataatactttaaaagacagactctaaagcaactgtttagagtaaaattctctttaaatttttaaataaaagatttccttcacttgttagaaaaaaattttaatgtttttaaactacattgaaatttatcaaattaacataaatttattagacaataaaaaacaatatgccttcttctaattataaaactgacagacactctgcatttaaccaaatactttggtacatggattttaacgatatctctaatgacttaaaagagccactagttttaatttagaagtatattaaatttttatattaaaatctaggattagcctattattacatagaaaatttgtggtctgcatgtacatcatcagttgagtggtctacagttttggagtttcagaaacactaatataagaatacttcttccgattgagtaatttaagttttctcagtgactaaaaaagattagaattactgatcactcacttacgatgtggttttaaatgttatttaatgaagatatataaagtttcttttaaaatcattttaacaacttatttcttttgctttttcacttttattagaaaataagtatgaaaatttatgttactacaaacccataaattttatttaaatctagacatagtgttaatcttcaaagatctgatatttaaaattttggataacctatttatacttagaagataaataactgctttccagtaaatctaatggggcaattttgactctcaattataagctattaaaatattaatactatcatctaggtggaaattttaggtatctgcatgctcaggttgtttagcatataaatcagaaactataaatgtttataaactataaataataaactaaaaatataaagtatcattttttctcagttttgaaatactgtcattatttctaggtgacattaacactcaattacagaggctgtgactgttgaaattagaaatgtcatggttgattcttctttacttgctgcctttttatttcacacaaacacagcagcacaagtaaggcaagaaaggccacgctttgactgcaaacacatcagtgcccttctagggagaataaatgtgtgagcatattcacttgaaattcatggcatcttttgttcaagtacagactttcatatggaaagtaaaaaagacaataatttcacagcaatagcataagaaaagtactctaaaaataccttctgacccattatttctatttttcacaagaatgattgtgatggaatgagcatttgcagcactgtggtcttaacctccactttctgtttaattatttttggaatacgaccataagacttttgtgcttttttttttttttagaaaaaatgttttatatttctaattcagtaatttagcataattttttgtctcacactttcaaaaatagttcattctgaaaaaaatgattaaaccactacttaccactttttccccaaaaagagtagagtaacaaatgaagtctataagtctagagtacatttaattcataaataataaaggtgtaatgtgttttagctgcacacttgaaaatgaaacactttttggactatagcccaagagttttcagagaggttagcttataacatgtgaggagacctggtatagaaacattcaccccacgccttaagaggtgaaaatttgtctttcactcttaatttcaactattaacccagagctggaaaaatagaacatttcattataccaaaaacattttgtttttattttatatctaaggggtacatgtgcagatttgtaaaacatgtatactatatgatgttgaggtttggacacttaattattccattgcccaagtagtatacatcatacctaaccagattttcaatgcttgtctcccttccttcctccttctctttagaattcccagtgtttcttgttttcatctttgtttccatgtgcacccaatttttagcgtccatgtatgagtgagaacatgtggcatttgtttttctgatgcattaatttgcttagaatggccttctgctgcattcatgttgctgcaaaagatgttacttcatgctcttctgttgctgcatagtattggaggttgtataagtacatcattttttcttaaccaataaaagattcatgggtaactggtttaattctgtttttactattgtgaatagtgttgcaattaacatgtgagtgctggtgtctctttgggaaaattattttttcggggcagatccccagtaatggggttaattggtcaaatggcaattgtatttttagttctttgagaagtttccaaactgctttgcacagggctgaatcaatttgcattcccatcaacagtgtagaaagatttccttttctccacaacttcaaatcttatcttgcttttaataacagtcattcttactggtgtgaaatggtattgcactgtcaccctgatttacatctttctgataattaggaatgttgagcaatttttatgtttattggtagctctgtcttcctttgagaagctagctatttatatcatttgcttttttattaaatgttttatagattcatatattaatcctttattttctgcagtttgcaaatattttatttcatactgtaggtcatctgtttactttgttggtagtttcttttactgtgcagaagctctttggctgaattagatgccattttcaatttttatttttgttgcactcatgttagatgttagtcataaattctttccagaggccaatattttctaagtgttctcccaagatttttgtagcttgaagacccacagataaagtctttaatctgttatttttttatatagaaaaaggtagttcagttttcttccacatacaactaaccagttttcccagtattatttactgaatagggagttaattccccttttatttctgttggctttgtaaaaataacctggttgtaaagtgtagcttagctcaggactctctcctatttcattggtctatatgtatatttttgtaccagaaccatgttatactggctactctgctgcaatcttggctcactgcaacctccacctcccaggttcaagtagttctcttgcctcagcctcccaagcagctgagattacaggcacgcaccaccacacctggctaattttttgtatttagtagacactggtttcaccgtgttggccaggctggtgtcaaacttctgacctcaggtgatccatccaccttagcctcccaaagatgacaggtgtgagccatcacgctcgacacagatttattcttttagtctgaagcagtcttggctatttgagctctttaattctcttgtatatattttggaatattttctttttctaattctataaaaaagcatcatagatagtctgataaaaatagcacttaatccgtaggttgctttaggcagaatgaccattttaactatattatttgaatccatgagcatccagtatttttccatttatttgcattctctctcatttctttcagcaatgttttgtagttctctgtagagatattttacccccttgatttaatgtatttctaggtatttttttttgtggctattgtaaatagagctgttttttattttgttctcagtttattggtgtacagaaattctatgcatttgggttgattttgtattctgagatttttttgaagtctttaggcttaggagtctttcggtgaaatctttaaagtattcttggtagagaattatatcatcagtaaagataatttgacttcgttttctattcagattccttttatttctctggctacgactccataactatgttcagtaggactgtttagaatggatattcttatttttattcttatggagaatgcatccagtttttgttttagtatcatgttggctaaggatttgtcacagatgacattattttgaggtatgtttcatcagtgtctagtgtattgataatatttttgtcaatattgcattttcttggatgctttttctgcacctattgtgttaaatatttttttcttttaattatctttacatggtgaatcacactaattgacttgcctatgatgaaacacctttgtttttatggaataaagctcacgtgattgtagcaaaataacttggatttgcttttgaattcagtttgctagaatttcatggattattgttccaatgttcacccagaatattgacctgtagtttcctttttttgttatgtcttcactagattttagtttcatatatttcactgatttcatataattagttagattgaaatgccaccttgattttttggaatacattcagtaggattaggaccagcttatctttgtatatgtagtaaaacttggctgtgatttcatatgatccagggctttttatggttagtagttttattattacttgttcaaggtcactatacattttacatttttgctctgttaaagacttctgttattttctgtcaatattgggaagttttgtgtatctgggagtttgttttctctaaattttctactttgcatgcatgttcatagaagtctctgaggatatttttaaatctatgtagaattagatgtgatttctcatctctaacatttaaataaatgcagaataagagtttaacaaaattcaacatttcttcataaatttctgaaaaaagtaggtataggacaaataaacctcaagccaataaatgtcacatataacacacatataaaaagcacagctaataacatactaaacagggaaatcttgtaagcttttactctaagagcaagaagacaaaaatgcccacttttttcagtcttattagacatagtatgaactatccaagacagaaaaattagtaagtaaaatcaaagcactgagattagaaaaaatgttaaattattcctgtgtaatttttcatttctatacacaattttaagtaaacaaaagcctattactaaaaattagtaggactaataaacaaatttattaaacttgcagaatacaaaagcaacatccaagtgtccatagaatttctatacattgacaactatctttaaatgaaattaaagaaatacacaattggaaaaatattactttcataagttggcattaatattgttaaacatctgtattatacaaaattatgtacagctataatgcaacctctaccaaaataccagagacataactgacaaatttttaaaaatatatctaaaatttacaggataccagaaaaggccctgaatagccaaagcaaccaagcaatagaaaaagtgaaggtatcactctaccggactgaactgaaatatactaaaaagctatagtaaacaaacaaacaaacaaaaaagtatggtacttgaataaaaacagacacacaggcaagtagagaagaaaaaggagaccagaaatatcttgatgtttatattgatgtatttacagccatctgatttttaaataaaggtggcaatttcttagggaaaaggcagtatcttcaataaatggtgttgagaaaactttatatccacatgtagaggaatataataagaccctcaactcacaccatatataaacaaattagatacttaaaataaaaacacaaaataaattagatacttaaatgtaaggtctaaaactctgaaactactataaaaaacatagactgaaagccctgtaacattggttgggcagtcacttttagaatttgacctcaaatcccaaggagcaaattgaaaaaatagatgaatcagattattttaaatttaaaaactgctgcacggaatataatacaatcaacaggatgaggcaactaaaaaatggaagaaaatatttgcaaatcataaatgtgacaagggattaatatcaaaaccatataacaaactcaaatgactatacaataaaaaacaaatattaaaaatgagaaaaaggcttaaatatttttcagaaaaacacatacatatgaccaacagatatattttaaaaatgctcaatgtaaattattatcaggaaaggcaagcaaaaaaagaactatgagatatcaactcacttctgttagaatgactctaattaagaagaaaaagtgttggtagaattctgaagaaaagaaaatgcttgcacactatttgtttgaatgtaagtgaggacagccattatgaaaaatagagttttcttaaaaaacttaaaaatagaactaccatatgacaattgcaccactgtatatccaaaacaaaggaaattagaatgaagaaacatttgcacttctaggttgttcgcagcactcttcacacgtaaaatacataaaatcaacagttcaacatctaatgagtaaataaagacaatgtggtagatatacacaatggaataatattcatctttaaacaacaaaaattctattattttcaatcacatggattaccctagaggacattttattagttgaaataagcaaggcacagaaagattaaatgtctcatgagttcacttacacatggattctgaaaaagttaatctcatcgatgtagagagtaaaatggtgaccaccaaatgccaaggtatttagaagaaatgggggcattgaaagatgtctgtcaaggaatacataattatacttggataaaagaaataatttcaagagatttattgtacagcatggtgactatagttcataatgtatttgtatttttgaaaaatgcttacaatttcatgtggtctaaccacaaaaatgttaacaagataaagcattaattacctagaactaagcatttgataatgtatatatacttcaaaatgttaacaaaagaaatacacattttatttgtcaagttaaaaatatatttttaagacactatagaaggataacaatgtttcaaatactgtctgtctctttgctgttttctcatttgtcagtcataaccataggaactttgatgtttaacagcatgttctgaacccagcacagtgcatgggagaagccaataactttagggcttttattttaagcttggggcacttggagttactggtgcttatggtgatagtatgaaagacacgaaaacggaaggcttgcttatgctcccatgactggccactgtgtgatcacagtaaactggtttgcatgcaaactaacaggaaatgttttaatccaaaagctgccattatctccaaaagttttcagagaaaacctaggagatcgctagttaggtgactaagaatataaactgtagactaaacttcaaccactaaaacattaaaaaaagagtgataaatgtctccaaatcgtaatatcaatatggaaaataaatattattccaaatgtacagaggtcattttattgctttgcaacctttaacattcacactttaaaacagaggattttgcatggaaatgtaagttgtgctgtaagtacatcctaaataaattttaaattgctcacttactattctcttaaaaatttaatttttatgtttgttctagcaaattacatatttgccacactttgtataaaaacctaacatttttcttttacaaagaaacaccatgctgatttaatcctctcttcggtaggcagtgtatgtcttttatgttaattagccaatcttaaagttgtattcgtatgcaaaccttccagttaaaaccaatgtttcagtacatgaaaaaataccaatgctctccttaaaacctacaacataccttgtgaatcacatggcatgaaaacaacagtgagaaaactgtagccataccacagaaaaagaaggactgtgatgcatatatggtttgaatgcacataaaaagacaaaacttagataattaggacatgaatgaagcatttctctttaaattcagcaagattcagctttgcagcctggaaaaaatgttctcttcacatgaagaatcaatgttatgtctttgcaattgatattttccatctctgacttgaagttataaactaactttagcaggaatgtttatgacaaaatatggagcatctgttacacactgagcactgtcatgtttgtttgctatatttatatataaaagcatccacatgacttatgaagcttccctagtacttactgaaacaaattgactcaataaataaaatttacttatgtcacttataaaaagggaacaataacttaagaaaagtaagcttatatagggttctcccatagaagctaatggaatgttttaactaaataaaatgtaacaatacacaaattgtggaattatatctaaaaataattttgtgtgcatgatgaaattttataaaaaatattcttataactcaaatcagctcagataaatatttcataaactataaaacaaaaaaataagaaacaaaaagattgtgggtctaggccgggtgtggtggctcacgcctgtaatcccagcactttgggaggctgagatgggtggatcacctgaggtcaggagtttgagaccaacctggccaacatagtgaaaccccatctctactaaaaatgcaaaaattagctgggtgtggtggcacatgcctgtaatcccagttactcaggaggctgaggcaggagaattgcttgagcccaggaggcggaggttgcagtgagccgagaccacgctattgcacttgagcctgggcaacaagaacgaaacttggtctaaaaaaaaaaaaagattatgggtctagcatgagtatcatgcaagtaaaaaaagaaaattttcatggaaagattctaaatgataagctgttagatagtgtaataaactgaatacaaagcagagtatatacatttgcttttagcatttttgaggatttttgttttctagtaaattagacatcttattaaaatgctttgttttgtttcaatattgctcttttcttctgaaaacagttacaaacttatattcaaacacccttactccttaaacctgttatatctttagactaatagatgtgtatatttaactctatgtaagtcaaaactaaaactctattgtgtgctctcaggcagaggccacgtgttcaaaaaatacataaaaaatttttgaaaattattcaggactcagaaatatatgattttatttacgcttgtatataatttttatgatgaccataaaaataaccatgtagccaataataatttaactgtacaacttagaataactaagactgtagaattgaattgtttgtaatacaaaacataaaagccagaggttatagctaccttatttatcacaatgtgatcattatataatgtatgactgtattaaaatacgccatatatgacataaatatatacacatattatgtaaacacaaaaactaagaaaaataaatttaaatgtaaaaaaatttaacctacaggaaccatattctttaacttatttgtagtttaaagccactaaaaaagaagaatactagagatgttagtctattatgttaccaaatagtgtattgtaaccatcttttaaatatacccttgagtaaggtggaataggttaaaactagtggcataataacactttattgaatgtataacagtatttaacattataaatgttgaattgaaaaattaacacaatccaaaactttaaaaaaaagtggttttatcacataaaagtacaattagtaaaatgacatactaattattttgatttaattttaactataagaatgattttctctcataataacgcattagaatattacttagggctgggcacagtagctcacacctataatcacagcactttgagaagccaaggcaggcagatcacttgaggtcaagagttcaagaacagcctggccaacatggtgaaaccttgttttactaaaatagaaatattagctggatgtggtcaggggcaactgtaatctcagctacttgggaggtggagacaggagcatagcttgaacctgggaggaggagcttatagtgagccgagattatgccactgcactccagcctgggcaacagagtgagattccctctcaaaaaaaaaaaaaaaaaaaaaaaaaaaagaatattactcggaatgccctacatcactcaattctgtaagttaaccacaaacagcctttccacttaaattttcatcatgcatcttacatttcaatgtccttagtcatccataaggtaataaataacgaccgcctaataaagtctcccaaatctttgatgcagaattgatcacattttttttacatgtgaatacaacagaaatgaaaaaaaggcgtgaagtaatttaagagttgaattccatcattattcagtttccaaataagctgttttttttttcttttgagacagagtcttgctctgtcacccaggctgcaatgcagtagcagcatctcagcttactgcaacctctggctcccaggttcaagtgattctcatgcctcagcctcccaagtagccgggactacagatgtacaccaccatgcttcgctaattttttttatttccttttagtagacatggggtttcaccaagttggccaggctggtcttgaactcaggtgatctacccacctcggcatcccaaagtgttggccttacagatgtaagccactgtgtctgacaaaaaaaaatctgtattttcaagacaaaagtgtactttaaatgaaattataactcttcaaagatctacttcttttaaagttacatacaaataatttttctttttaccaactttagttttggattttttcctatactcagcaatctgattaagtgtaatgtctgaagtttgagacagatatttctactgtgaattctctgatatttacttaattttggattaaaattttttaatatttacttcatctgcaaacatatattttagtataaactttcgtgttttataatctgtagtttttgaaaaaatgtttttccaaattcattaaatttgcagggttattcttcaatataaattccctgatgttgagcaaagttggaacaactacctcagggttttcctgtagtacaaaatgtgtacaataaaacctgtgatacacgtaaaggtactacaactctctttatatttataatgtgtttcctcaaaataaatattcttctgtactttaagggcttatattttctgaaagatctattgacagcaactgcacttttaatgcttttatttagtatgaactctctgatgctgaataagatgtgagaagatattaatgacattcacattttttcccctagacagtctccctctgttgcccaggctagtgtaaatgctttcctttgcaattaggcatgagcattggttaaatgttttgccacattgtttattctagtagttttctccagtatgagatatcttacctacaatcaagtgtgacagccatttaaaggctttgtcacattcttcacatttctaggatttctcaccagtatgatttcttttatattcagaaaagtttcaggtgttgccaaaagccttgtcacatctttcaggtttgcagtttctctctagtatgaattagcttatgtctgttaagaattgaggatctgttagaggctttcccacattcttcacacgtgtatggtttctctccagtatgagttgtcttgtacgtagtaagccttaaggactgattaaaggctttgccacattccacacaattgtaggaattccctccagtatgaattaccttatgtttagtaaggattgaggaacagttaaaaaatttgccacattcttcacatttgtagggtttccctcctgtataaatacccttatgttcagtaagggttaagaactaattgaaagctttgccacatttttcacatttgtagggtttttcctccagtatgaattctcttatgagtagtaaggtgtgaggattggttgaagtctttaccacattcttcacatttgtagaatttctttccagcatgaattttcttatgtttgttaaggactgagacccagctaaaggctttgccacattcttcacatttgtagggtttctctccagtatgaattctcttatgttcactaagtcttgaggaccagatgaaggctttgccacattcttcacatttgtattgtttctctccagtatgaattaccttatgtttagtaaggtttgcaaccttactgaaggctttgccacattcttcacatttgtagggtttctctccagtatgaattctcttatgttccataaggtttgaggaccacttaaaggctttgccacattcttcacatttgtagagtttctctccagcatgaattgccttatgtgtagtaaggcttgaggaccagctgaagactttgccacattcttcacatttgtagtgtttctctccagtatgaattactttatgtttagtaaggctcgaaaatgtagtaaaggctttgccacattcttcacatttgtagggtttctctccagtatgaattatcttatgtttagtaagtgttgaggaccacttaaaggttttgccacattcttcacatttgtaaggtttgtctccagcatgaattctcttgtgttcagtaaggcttgagggccagctgaaggctttgccacattcttcacatttgtagggtttctctccagtatgaattaccttatgtttagtaagggttgagaagttaccaaaggctttgccacattcttcacatttgcagggcttctctccagtatgaattctcttatgttccataaggtttgaggaccggttgaaagctttgccacattcttcacatttgtagggtttctctccagcatgaattgtcttatgtgcagtaagggttgaggccttactaaaggctttgccacattcttcacatttgtagggtttctctccagcatgacttctcttatgttcaataaggcttgaggaccgggtgaaggctttgccacattcttcacatttgtaatgtttctctccagtatgaattaccttatgcttagtaaggattgagaacttactaaaggctttgccacattcttcacatttgcagggtttctctccagtatgaattctcttataagtaagggctgaggaccagttaaaggctttgccatgttcttcacttttgtaggaattctctctagtataaattcttttatgttgagataggtgtgaaagcatgcaaaatgatctgacatattctttacatttcaaaagtttctttccagtatgccttatcttatgtctttttgaatttgaacatttatgaaagatgtttgcatatttgccacattgaaatactttgctttgtgtagttgtcaaactctggttaagcttattataaccttttttgtgcaccttacactcatccacattggtacaaccaatttttaactgtaaattctcatgtccacatttttcatatcttctcaatatcactttttggaaagaatcttctctgccctgctctggccaaaggtcttgagcaaaatgagaacatataactgaaaagaaataaaaataacaaattagtccacttattagataaatatagtttccaaatttaacctataaaattattcaaactacataagcaagatgacactgcagtatgacacaggccctaattcttcacagacatataaatgtaataaaagcatacagaccaaaatacatatgtagataatttatacatgagttaagtgtgtacagtgtctgaattaagcccaatgcaaagagccacatagaaaaaaagaaaagtttgttaaatttacccaatcaactctttctgctcctcaatattacctagtcccttcagaagtaaattgtcaacttctgtttttttttctaaaggcaagtaaaatattggcacatacaatttaatttctgtcttctatgggcctttccacacactggtttctgtctcccatgacataaagtgctgaaagatatggtggtatacttagaaatgacagtttgagtctgttgagaccaaagataaatacaatgcagcagagcactgcagtgctgcaaagagagaaaaggtgtaacaagtaactacttttcagaagaaacataaataatctcttttaactaaaggtaagcacaaaatttcagacaagacaaatctgaagatgtttgagagacccacataatctctagccaagaccattgttttctgactacaccaggacaaagctatattataaatttttaaatgtccaaatctcaaagattacaatctatacaaaatagggcaatataatcccatcaaaaatattataaaattttcagaaagaaaccattaaaaatgtatatactaattttaaagattgaataatactctgagtgaaataggaacacaaaagactatagaaaatcagaaaaatgaggataagaacaaaaatatctacattgtggtgataaaaaatacaaaaagaaataactgattctaaaattaagataaaataatgtaaaaataaaaaacaagatcaaaaagcaaattaggatacacacaaatacatttataacaaaaacatatttataatcacaatttgaacagttacagacaaaaagagaatcttaggagctgcaagataaaagtgatttgcaaacatagtcttatgagataaccagtgaattgtcaacaaaagatttacaggccagaagagaactgtgtgagatagtcaaagtcctaaaaaaaaaaaaaaaatagctatcaagtgagaataataccaaatcagcaaatctgtcctaatagaaaaaaaacctttcaaaataatcaaattcacaaaaagtatatcggcactgcatatgtcttccataggaaagatgctgaaagcagttcttaccactgaaaataacgtaacataaaaaaacaacacctagcgtttgagctctgctaagggtcagactgccacctcaagtgggtccctgacacccatgtctcctaattgggaggcacctcccagtagaagctgacagacacctcatacaggagagctctggctggcatctggcgggtggcctgtgggacgaagcttccagaggaatgaatgggcagcaatctttgctgttctgtagcctcagctggtgatacccaggaaaacagggtctggagtggacctccagcaagctccagcacatctgcagcagaggggcctgactgttaaaagaaaaactaacaaacagaaaggaacagaagcaacatctacaaaaaggatgtttactcagaaccccatctgaaggtcatcaacatcaaagaccaaaggtagataaatccataaagatggggagaagccagtgtaaaaaggctgaaaattccaaaaaccagaatgccttttctcctacaaaggatcacaactcctcaccagcaaacaaacaaaactgaacagagaatgagtttgacaaattgacagaagtagtcttcagaggtgggtgggtaataacaaactcctccgagctaaaggagcatgctctaacccaatgccaggaagctaagaaccttgaaaagaggttagacgaattgctaacaggaagaaccagtttagagaagaacataaatcacctgatggagatgaaaaacacagcatgagaacttcgtgatacatgcaaaagtatcaatagctgaatcgataaagtggaagaaaggatatcagagactgaagatcaacttaatgaaataaagcaagaagacaagattagagaaaaaaagaataaaaagaaatgaacaaagcctccaagaaatatgggactatgtgaaaagaccaaatctacatttgatcggggtacctgaaagtgatggggagaatggaaccaagttggaaaacactcttcaggatatcatccaggagaacatccccaacctagcaagacaggccaacattcaaagtcaggaaatacagagaacaccacaaagatactactcgagaagagcaaccccaagacacataattgtcagattcaccaaggttgaaatgaagaaaaaatgttgagggcagccagagagaaaggtcgagatacccaaatggaagcccatcagactaaaagtggatctctctgcagaaaccctacaagccagaagagactgggagccaatattcaacattcttaaagaaaggaatttcaacccagaatttaatatccagccaaactaagcttcataagtgaaggagaaataaaatcctttacagacaagcaaatgctgagattttgtcaccagcaggcctgccttacaagagctcctgaaggaagcactaaacatacaaaggaacgactggtaccagccactgcaaaaacataccaaattgtaaagaccatcaacactatgaagaaactgcatcaactaatgggcaaaataaccagctagcatcataatgacaggatgaaattcacacataacaacattaaccttaaatgtaaatgggctaaatgcccccaattaaaagacacagactagcaaattgaatagagtcaagatccatctaagtgctgtattcaagagacccatctcatgtgcaaagacatacatagactcaaaataaatggatagaggaatagttaccaagcaaatggaaagcaaaaaaaaaaaagaaacaaaaaaaaaaaaaacaggggttgcaatcctagtctctgataaaacagactttaaaccaacaaagatcaaaagagacaaagatgggcattacataatggtaaaggggtcaatgcaacaagaagagctaactatcctaaatatgtatgcacccaatacaggagcacctagaatcataaagcaagttcttagggatctacaaagagacttagattcccacactataatagtgggagactttaacaccccactgtcaatattagccccatcaatgagacagaacactaacaaggatattcaggatgtgaactcagctctggaccaagcagacctaacagacatctacagaactctttaccccaaatcaacagaatatacattcttctcaacaccacatcacacttattctaaaactgaccacataattggaagtaaaacactcctcagcaaatgtaaaagaatggaaatcgtaacagtctctcagaccacagtgcaatcaaattagaactcaggattaagaaactcacccaaaaccacacaacatggaaacggaacaacctgctcctgaatgactacagggtaaataacaaaatgaaagcagaaataaaaaagttctttgaaaccaatgagaacaaagacacaacataccagaatctctgggacacagacaaagcagtgcctagaggaaaattcacagcactaaatgcccacgagagaaagcaggaaagatctaaaatagacatgctaaaatcacaattaaaagaactggagaagcaagaacaaataaattcaaaccctagcagaagataacaaataactaagaacagagcagaacagaaggagagacagacacaaaatacccttcaaaaaaaaaaaaattcaatgaatccaggggctgattttttgaaaagatcaacaaatagataagactgctagccagtctaataaagaagaaaggagagaatcaaatagatgcaatcaaaaataataaaggggacatcagcactgattccacagaaatacaaactaccatcagagaatactataaacatctctaagcaaataaactagaaaatctagaagaaatgaataaattcctggacacatgcacccttccaagtctaaatcaggaagaagtcagatccctgaataggccaataacaagttctaaaatttaggcagtaattattagcccatcaataaaaaatgtccaggacctgatggattcacagctgaattctaccagaggtacaaagaagagctgatcctattctttctgaaactattccaaacaatacaaaaggagggaagcctccctaactttgtatcaggccagcatcatcctgatacaaaaacctggcagagacacaacaacaacagaaaaatttcagtccaatatccctgatgaacatggatgcaaaaatcctcaataaaatacttgcaaactgaatccagcagcacatcaaaaagcttatccaccacgatcaagttggcttcatccctgggatgcaaggctggttcaacatatgcaaatcaataaacgtaatccatcacataaacaggaaccaatgataaaaaccacatgattatctcaatagatgcagaaaaggccttcgacaaaattcaataccccttcatgctaaaaactctcaataaactaggtattgatggaacgtatctcaaaataataagagctatttatgacaaacccacagacaatgtcatactgaatggccaaaaaccagaagcactccctttgaaaaccggcacaagacaaggatgccctccctcaccactcccattcaacatagtattggaagttctggtgagggcaatcaggcaagaaaaagaaataaaaggtattcaaataggaaaagaggaagtcacactttctctatctgcagatgacatgatttagaaaaccccattgtctcagcccaaaatctctttaagctgataagcaacttcagcaaagtctcaggacacaaaatcaatgtgcaaaaatcacaagcattcctatacaccaataatagagagccaaatcatgactgagctcccattcacaattgctacaaagagaataaaatacctaggaatacaacttccaagggatgtgaaggacctcttcaaggagaactacaaaccactgctcaagaaaataagagaggacacaaacaaatggaagaacattacatgctcatggataggaagaatcaatattgtgaaaatggccatacggcccaaagtaatttatagattcaacactattccatcaagctaccattaactttctttacagattttgaaaaaactaaatttaatatggaaccaaaaaaaagctcatatagccaatcctaagcaaaaagaacaaagctggaggcatcatgctacctgacttgtagtatcgaactacactacaaggctacagtaacaaaaacagtacggtactggtatcaaaacagatatatagaccaatggaacagaacagaggcctcagaaataacaacacagatctacagccatctgatctttgagaaatctgaaaaaaacaagcaatggggaaacgattccctatttaataaatggtgttgaaaaaactggctagccatactcagaaaactgaactggaccccttccttataccttatataaaaattaactcaagatggattacagacttaaatgtaacaccccaaaccataaaaaccctagaagaaaacctagacaatgccattcaggacacaggcatgggcaaagacttcatgactaaatcaccaacagcaatggcagcaaaagccaaattgacaaacgggacctaattaaactaaagagcttctgcacagcaaaacaaactatcatcagagtgaacaggcaacctacaggatgggagaaaaattttgcaatctagccatctgacaaagggctaatatccaggatctataaagaacttaaacaaatttacaagaaaaaaaaaacaccccatcaaaaagtgggcaaaggatatgaacagatacttctcaaaaaaagacatttatgtggccaacaaacatgaaaaaaagctcatcatcactggtcattagagaaatgcaaatgaaaaccacaatgagtaccatttcatgccagttagaatggtgatcattaaaaagtcaggtaacaacagatgctggagaagatgtggagaagtaggaatgcttttacactgttggtgggagtgtaaattagttcagccattgtggaagacaatgtggtgattcctcaaggatctagaactagaaataccatttgatccagcaatcccattgctgggtatatacgctcaaaattataaatcattctactataaagacacatgcatgcatacgtttattgcagcactattcacaatagcaaagatttggaaccaacccaaatgcccatcagtaatagactggataaagaaaatgtggcacatatataccacggaatactatgcagccataaaaaaggatgagtccatgtcctttgcagagacatggataaagctggaaaccatcattctcagcaaagtaacacaagaacagaaaatcaaactagcatgttgtcactcataagtgggagttgaacaacgacaacacagggacacaggaaggggaacatcacacaccagggcctgtcggggagtgggaggctaggggatgaataacattaggagaaatacctaatgtagataacgggttgatgggtacagcaaaccaccatggcacgtgcatacctacgtaacaaacctgcacgttctgcacatgtgccccagaatttaaagtataataaaaaaaatcaaaacagaatattaacaaggaaacggactacttaaaggtggtataaaacaactatttctgacagaggtatagacagcactcctcaacatcgggatatacacccttctcaatagctcatacaacatatttcttgatagaccacctcttaggccaaaaaagaagtcttaccaaattttttaaaactgaaattttatgaattattttctatgactaaactcaaatgcaagtatacaataatagaaaaaaattgaaaaaaaaatatgccaggcatgggtggctcacgcctgtaatcccagcactttgggaggccgaggtgggtggatcacctgaggtcaggagatagagaccattctggccaacatagtgaaaccctgtctctactaaaatgtgaaaaactagccaggcttggtggcatgcacctgtagtcccagctactcaggaggctgaggcaaaggaatcgcttgaacccgggaggcagaggttgcagtgagccaagattgtgccgctacactccagcctggagatagagcgagactccatctcaaaaaaaaaaaaaaaaaaatacacacacacacacacacacacacacacacacacacacatatacacacacataggaatttaacaaaacactcaagcatgctcttatgcaaatgttgtaatagttaacattgtaaagatgttcatcctggtcaatgtaatctacaaatttaatgaaatgtttttcaaatttctcattgcatttttgaagaaatagaaacagtaaccccaaaagtatatagaatttcaaaagacaataaagttcccaacaatcttaaaataataataataataataaagcaatattgcaggcattaaagttcctgatttcaaaagacattccaagctacagaattaaaacaatctggtataaggatgaaaaattagactaatgaaatagaatgcaacacatatatatactttaacatgtatggtcatatgaggagtcatttacatagcaataattattactgtaagctaataggtaaaggcaatgcaaatttctgtcaccaaatcattcagtaaatataatctgaaatataaaaatactggaatatcactcagttttcaaaaagcagaaaatgttctaccaattataaagataaatcttgataacattatgcaaaatgaaatgagtcagctgcaaaaagacaaagattatatgagatatatagctataaagcatttacactcttagaagcagataaaaagaaaaaggtgccctatttgcttaacccccaacagcaagaaagtctgtcagtcatccatgacaaaaatgtcttaatgagagaaccaggcagcatggttaatatctgtaatgacagctacatggtacagtaaggttgaagaattgcttcaggccaaaattttaagaccaacctgggttatgcagtgagaccccatctcaaaaataagtgcctttaagagagctttgagatccagggaggcaattgtgaaactttgctaaagcccaagattgaggagcacccttttcagaaggcaagctttcattcaggtggcaaactacaggacccctgctcttgactacagaccagaaaatgtcccacccaacttggtcccactgaaaattttgaacttactctgtaatcatcccaaactcctcccagccacagtctgtgagaggtcttgggtcttccagaggcctggagagtgatacccatttagagcaatgctggcaggcctgcagaccttggtcccaatagcagttccaagactcagttccagcttcctaagccacagttcatggccagttctgcctatgtagaaatccacagtgacctcagaaatcctctctggtactcagtgaaagccatactaatccacatcctaatataaagcccaccatatgcagacctgactgcagaaacctgccctagcatctaccctactgagcaaagtcctgaaggatatttactctgtccaaaaataaaatgggaattacaactacccaagccccttgtaataagctaaccctagtgcagagccagcagccttgtgaccaagctacaaccccactctactacaaacccagagggcattctatcacgctggaggcccaacaaaagatttttaccctctgaaaccagtttataaaaactttaagaggtgtttgcgccttcaaattgagacaccaatggaaaagtatattgtgcccattgtcaatgcttctattttaacacagcacttgacgtatgtggaagaaaaattagtcaaaaaaattttaaagtcattgaaattgaagacaaataagtaaaacattgctgcttgtagatcatgcagtgttctctataaaaaaaaccataaacagtacattaaaaccttttaaaatacactcagtaaattagcaaaatataaaattaacatataagttatgattccatacacttaaactatctgataaaatagaggaagaaaacaatcttatttacaatagcactaaaataataaatatccgagaacaaatttaaccgaggagctgaaaaacttttcaagtgaaagatttatcaatgaaaaatgagagaacacaaataaattgaaatatattttgtctatcgattcaaagaataaatgttaaaatgccatattatccaaagtggtctctagattcaataaactctctatcaatattccagtggttttttttcacagtaatgaaaaatacaatcataaaatttacatgaaactacaagaaactgtgaatagccaaggaaatcttgaggaaaaagaaaaaagcaggacaacatactttataatttcaaactatatttcaagactatagtaataaaaacaggatgaaatgtacagaaaaatgaacaaaaaacacccaatgatacagaaaccactactctcacatatttcagagatgatggaaaaagagaacttaaaagatagtttaacatggagtaccttaaaattatggaaatatctgtgtccacaaaaacaaaaacaaaaaaactcagattgtgcactctcttgtatgccatgaacagtactttggctgtcactgtaaacttgaaggaagattactgaagggaaaaaataattcttagaaattttaaaagcataagacagaagatgccactgtgtgagagaaaattaaaaaataaaaataaaaattaggctttccagaaactatttcttttggaacacagcttcccatatcactttaaggactggctttctccttgactttggacctctcatccatgttgtctgtattcattctcacctacctggcggttctttcaccagctcatgtctcttcatattccagggctcttttccttgctccagaaaaatgatcaggtctggcttaggggcagcaatacctgttttattaaaaatgagtaacatgcatcttgctcatattctccaattaacaacttagtaatgtgctcagtaaagaggatgtgatagaatattctaatacatttatcccaaaatactaaattacaacagaaatttctaaatatttagaaaacactctaattttgtaagttcttaattttatcacctggtactactgaattaaaaattggtggtggaaattagattttaaggtgtgagcaccagtatttatgccagtaaaattttgaaattaccattaatctaaagtgaaggacagagatcagctcaagaatgtggttaagttaaggtcaagatgaaacatcttgaaatttttttctctatggaaaaatccctatgattttcttgaaaacagaaatctgaaagcataaattaccaaaaagaaattatacaaaagagaaatgatgttgggagccgaaaggctgagggttgtgaccaactcagcattccactggaggctatatgatcaaacagcaaactgtttatcatgaatgcagaatgtgggcgaattcgcttctgctcctgccgccacaaggtacactaaggacagtcaccccctggtgccatgcttcttgaggttatctactggaacatctgcagagtactgtttaaagaatacagtcatgcagggttgtactaagtcaagcagctgaccacaacctcccccttctccctatctcctttactcaataaatatgaagggctatagaagctcagggcccttgttcactagaagcaaagagccccctggtgccgtcttccaaatatactcttttgtctgcctttattcctgcattcatcctcctttgtccaggccaataaagtccacagcaaaatgaaacctatagtgtatactaggaattgcgtattaaagttattctcacccaggaagaccaggtttctgtagttctctaacatcacattcctatataaattctgctgtgcagtgtccaggcattgccactcctccagagagaattgtatggccacatcccgaaatgtcaacgatccctggaaaacacacacaaacacacatatttaccaagtggtcatgggcagaatttttaatttgactcaaggtaaaatggaaagagtaaaaagagctcattctgacttacaggagtgactgaaatcattcaataaaatagttttcaacacaacaatattctctaatgtattctctaactctgagaaaagaaagtggtataagatccataacatcagtgtatgtatagtatttttctagataataaagtataaacttgagggcataaacactaacatgtacaattttgagtgctatatttacatcaaacagaattaattgtgtgccaggcgtggtggctcatgcctgtaatcccagcactttgggaggccaaggcgggcagatcacctgaggtcgggagttttagaccagcctgaccaacatggagaaaccacgtctgtactaaaaatacaaaattagctgggtgtggtggtgtgtgcttgtaattctagctacttgggaggctgaggcaggagaatcgcttgaacccaggaggcggacgttgtggtgagccgagatcatgccattgccctccagcctgggcaacaagagcgaaactccatctcaaaaaaaaaaaaaaaaaaaaaaaaagaattaattgtttgtatttttcagatggaaaagacatagttgtgtatattgttcagatggaatagacatgttgagttagaaggtatcactcaaattttaatgtgtacaataagctggagatcccattaatgcagattattatttttttttttcagaacatcagggataaagtctgagttgctgaatttttaaaaagctcatcagtatgccaatggttttggcccaaaaagactattttgtcaaatacccagtaattgaatgagcctgtgtttttctcagtttttctggtttgtaaacaaagattctcatcttcatttcccaaaaacagacaaatgcaaaggaaacctaagaaagaagggcagctgccagattaaatgtgttggtttgttcacatcagctgcataaagatacttaacgatgaacagaaaaataattctatagtgaaaaaatgtgtcggagagcttatcaaccaagtgatttattaacatcaactacactagaacaaatttttataatgtcctgatgcacccagaaggatacagcattactactgagatattaccccccaaaaggtaaattatagtctgaatttaaccataaggaaacattagtttaatggaaagttcaagatacagatatctcccatgttctgtaatttttaatagtgattttaaatagtctttctttagcactgtagagagcagttatctcctataaatttttttagaatttcctgggtaataaatactatactgcttcaatgagtggtttcttaatcctgtactgcatagacataataaggaacacagacaaaacctcaacattacatgttctctgccttcactaaaaaccccaggttttccccaataggaattttgagtatctacaccttcccatgttcaacagccacaaagggacattttaaatattgcagattataaaatcatagtgagatttctgcacggcatataagaagccataatgtagagaaggctctggtatatagaaaaaaatatatttttcagagactttgactattgtaagaattttttaaagtagttaagacaaactcattagggaggaaaaacacaagtagagaagtacaggtttgcaagtactaaatgtatgtttcctggaggaagcagagtggacacagatcttgatctgagacacatttagctgaaaaaaaaaaaggtcatttttttctctttctcctccttttctaggattctttctcagataaaattctctggacaaattacacctgcatcttgagaagatgcctttaaaagagtcagcaccacaggtctacctgctgtcaccacatccacaggcagaaggaccaagacagaaaaactccacccaattctgtcctttatagcagaagagatgaagaaacaatgagtagctccagagataaaaatatgcttttctttattttgtcctcgggagccatcccctgacacaggcaacagcaatttctgccacagtaatggaaatatgggccacgctgtcctgcccctaccaaatccaaacagaacaggttcttggaccaccctttaatgcaaagatggaacttaactctcatgaatgtattatgaattcctcatacttgattctggcctcaccttagagtcacatgagccacttaattaaaacaacatggatgcttccacaagaacaataaacagaatccatggaaagggcacaagtaaaaagagttctgcaaaatggccaggtgatactatttagcggcctgggctgataaccccttaactaagactaagcatttcctctcaagctctaacgagcttataaatcacttggtaattttctccccactctatgaaatgtaattctgcaggtatggaaagggtccacaaatgggtcttttaaacaagtgcgctgtcagtaatgatgttgttcccactgggcttattattacccttaattagaaaaatgaggcacaacacagagtcccttacacccagcactcttgtcacaacacaaatacttctggtacaaatgaagacaaacattcttcatcctaaagtattatattctttgctgactaaagtttacagagaaaatagaaagcagcaatttctgagtaagtctgcatttggaaaacaacatgtgcacatgtactaatgtaatttttattaagcaggtattatgtgatgttacagagtgctgtgatagcacattatgtgatttaatcctaataacaccctgtgagttgatactaagtgttcagtaattccaacactttaaaggacccagcatttttatttctatttctgtttatctgtcactgattttttcaaaaaatgcatagaaaaggtaaatatagacagatgaaagggatacagatggaaagaatttaatgcaatttagataaatttttattgtgtttatatttactttcttgtgacttgtgaatcaactactagatctgcaggaacagaaaacagttgctaaataatgtttctgcaagcactggttttaataaaaaatttgaaaagatcctacaatacatactttatatttcccgttatctgcttttgggtttcagaaaatgttgagcaccagctctaaaaaggcaacaggattcatgactcaaaactctgatttcctgtaatcagttctgtgaggcaagactccggggtagagccagacataaataaggcctccaaaaagggtgaatatgaacagggctggggcagagcgtacagccaatgtacaattctgttctctatgccactggggggtattgtcagttctttttgttaaagcttacttaagtaaacttaaatctgagtttgtataattttaatcttttttatcactgtcctgtgaattttatattatatgctaataagcaattttaaaaatcccttaaggttttctagaataattttttagaagaaaaataagtattcttagcagggtaaaataaatacaaataacaatgacgactcttctaagttcagctgtagacatcagaagccacaatataaagtggcccaaataaagcccaagtttttgcacacagctatttattgtacccaccatatgatgtataattcaaccatatttccagttgctagtctagactaaaactgccaggatggtaggaaccatgactgcttcatctatttttcttttctttttccttttttttgagactgagtctcactttgttgcccaggctggagtgcaatggtgtgatctcggctcactgcagcctccgcttcccaggttcaagcgattctcctgcctcagcctcccaagtaaccaggactataggcatgagccaccacaccaggctaatttttgtatttttagtagagacgggatttcactatgttggccaggctggtctcgaactcctgacctcaggtgatccacccaccttggcttcccaaagtgctgggattacaggtatgagtcactgcaccccacctgcttcatctattttttttttatgactatatgaaatggaagcaattagtttatctgtttgagcccaattagtttatctgtctgagcctcgagacctcctgattttttacccgagtacagggaacttgaaaaactctcttctgggtaccaaccaaagatacttcttgtataaggggagaaacaaacacaagatgactcatttctctcacaatgggacagaagcagaatttgtcactcttatcagcctgacacaattctgttctggacattctcaaatgtctcaaagattcagaggtgattgtgagagggttccccatgaccctgggctgatggtccactgataagccaggcagagaagactcgggatgattctaaataaaaaatggaactgccttggttgaactcccaaacctgggtcatccatcctgatttgctagctgtcctgatttgctagctggtgggtaagtagaaggacaagaatactttactccagtatcacattttacaggtagatatagttgtggtcatggctctggatactttgtggccttaagatgcttgtttacacttagagattctgccatcagattctatttactccgggagcctctcacatacctgtggcagattaatgaagaagatgtgaaaaggtcaaaaagccacactctcaaaagaggaatttaaaatgtctatgttgatatctcacaatgcagaaaatgcctcctgttggttttctgtaaattctcaatccaaagtctggccctgccttgtaaatcccaggcagaggccagccagatcttatttgcagattctaggtgaaatcaacctcactctgcatttttgggtgttacagcaagtagagtgaaatcaaaggagagattccctcatagaggctgctctagaacattctaaataatattttaccttaaaaaagctgacacaacatgaacataagcagacagtttatttgggtcaagcttaaggattttaacttgagaccaaatattcaagttgcctggaatccacgctttcattagcagcacttacaagtggatttgcaaaggcaaaaaaaaaggaacagtgagtgagctgatacaaaattggttgcgagaaattcttatttatgtaaagaaataactttaataattaattggatatacattgttaaggttaaggatatggaatacagtgtccagtgtggaattattagtttaatttatagctacttgtggcaatagtgaacagtttcaagagatacatagctgaaaaaaagggagaaaaacatgattgtgctctcattttaatgcctctctgagtctgataactaaaaggacttgcattcctcagacaaaaactttttttttcttctcaattctcaagacctagatttagaatttggagctgcaaattcaggtcctgcatgggtaaaatagcagcaagtgttacctgaacatttgtgggcattttagcatgaggagggagggagaagtggattctcatgtctacaggtctgctcaatgcacatattttactctgattgggccccatggtcactgaatcagtttcaggtctgaggacacaagagtcactgaaagaggtaaaatggctaatatctgaccaatgaagtctgtagaaatctggtctagcctctctaaaagtgactctagacatgatagataccaagtaggcagacgcacaattccacctgcatatttaggggacagcatgcacttcacagcacaattgtgaactgactggaagccgaaaaggcccatctagagtaaagcttagttggcaccttatgtgtttacattatgtctggtaattctagacaggatttggaaaatataattaaaagcaaaattttcttcagccccagaggaactgcacagtaacagaacagaaagaaaactgttttattacacaattacatgtgaatgtgacatgcattacagtcaatttgctcaagagattgcaaagacagaaagacagtgaccataatcagtctacaagtagaatttacagcaccatgtcatacatagttcatcctaaattcatctggtagttgggaaggccatccatgtatgctaattggttataatcaatgacaaaataaacttttcacatcttcatgactggaggtagttttgcaacttgaaccccggtgcctgctgaaggtaggctttgactcttctacaaaaattgttgattcgggtgctatctttttggctctttacattttaaagcaataggtctctactccctgagcactgggcttgagtactcctgtttccctctcctggtggctagtgtactctcttgacccctaccatctgccactgaggcacagcccacagcacagggctcacagctggaaactcacatcttaggtgaaccccaattgccacagcagcactccagtgccacatcagacagtgaagcctgagcagcaggaggagagcttgcaggcctcctgggtagaattgcaccttcacaataatagaaaagggagcactgtttcagcctcagtttttatttataatggtggcatgaaaaaaatactgctgggttttggcatgagtccagatagagatagctctgagagttctcactgtgacagcccacgtctttcacagacaccatgggactaatagggtttctgaaacagacacacaatgcatttgagagaaaaacagctctcattctgagaaagattatattgaaagaaaaaagttaaaagtgtcttaagaaaaaactgagattggatataagattgatcaagtcagccagaaaatatctccctaagaagaatttctctccaaacacccaagtgcatagctactctcagcaagagaaacaggagcattattgaataaagggggcatattctcagcagaatttttttttttttttgagatggagtttcaatcttgttgcctaggctggagtgcaatggcgtgatcttggctcactgcaacctctgcctcctgggttcaagtgattctcctgtctgagcctcacaaatagctgggactataggcacgcgccaccacacccagctaattttgtattttctgtagagacaaggtttcactatgttgtccaggctggtctcagactcctgacctcaggtgatccacccaccttggcctcccaaaatcctgggattagaggcatgagccactgcacccagctctcagcagaattttaaaagatttatcttccatctctgctgctctcttatttcctaaccattgaatgtgagatctatattggaatatatctgacaacttccagtagcacttttttataaaaaattgaaatctgtgttaatatagtagaatatattagagcttgcaacatagctaactggagagctattatggtttttgggtagccatatcatctgtctttatttgtcctgtaatagcagcataccaatttggtaaaatataagacactaaaattatgcttacctataattattcccactggataaattaatagcatgtcagactaatatctactgcaacgatttaatggtaaatttttttggatatcagatataaatatataagtatgaataattttatgtactagtcataaggtatgtaatattttaaaaaattatctgaactgtaattcagttgaaacactgtatttcaaaagtatgaataacaatattaaaataactaaggaattcaatcaaagtaaatattgtggccttatattcatactattgtagaaaatactgtttaatttatatgaatgcaggttgtctacaaacactacacataactatactaactgtactgaagtaacccaagtacaacagactccactgttcagtttatacactgaactcttctggcttttgcagtgtaagtatgtcagcctgcaaataatcaccttggataatcaggtttctgccaaagaacttactcagtatcttttagtctatattattctgcattgctaaatttattccgatctttgtgctcaacttttttatgctcttgaaatgaagtttactctgaacaaatctgtgtctagtttaaagactaaagaaagataaaaaaatataaccttttgccaagacaaaaagaaagcaatgaatctcaggtcccagataaagacaattctgagtcaaaaagaatgacaaaaggtttgtttcattgttaatatgatttacatatacttcaaaaagcagaagaaatatatacatataatctaaacttttttttaaaaaattaacaagttatcctcccttattttcacatatgagaataaaacctcttattgctaatttatattttctcttacaacagccaggtctctggacaagttcttgaactcttggatctctgaattttgcacagtgtgtgcacttgaaaggatgtttatggggggaaaagcagaagagagaaagatgttattaagaaaccccatgggttcacatgaataaagcaagttcttagagacctatgaagagacttagaatctgacacagtaataatcagagactacatctgacaagcactaatggacagatcattgaagaagaaaattaacaacaatattaggacctgaactcaacacttgaccaaatagtcctaatacacatctacagaactcttcatctaaaaataccataatatacattcttctcatcaccacgtggcacatactctaaaactgaccacacaatcagaaataaaacaattctcagcaaattcaaaaatcccaaaatgacacaaaccacacacacgggctacagcttaagaaaaatataattcaataccaataaaacaactggaaaccatacaattaaataaaaattaaatggcctacacctacacttgaataactttttggtaaataatgaaattaaagcagaaaccaagaagtgttttgaaacaaataagaacaaaaatacaaaataccagaatccctgcaatacagctaaggcagtgttaaaagaaaaattcatagcgttaaatcctcacatcagaaagttagatctcagtttaacaacctgatatcataaataaaagactgagagcagtaaaagcaaatcagtccctaagctagcaaaggcaagaagtaaccaaaatcggatctgaactgaaggagatttagacatgaaaaactacaaaatatcaagaaatcctggcattaaatctatttaaaaaaaaaaaaaaggaaataaactactagctaggttaatgaagatacgaataaacacaattagaaatgagaaaaagagacattaccactaacctcacaaaaatatactgaagtctgctatgcacataaaaaaaaatctagaagaaatgaaaaaattcttcaaaggacacaaatgtggctaacaagcatataaaaaaatgctcatcactgatcattagagaaatgcaaaagaaaaaccacaacaagaaatcatctcaaaccagtgagaacggccattattataattcaaccattgtgaaaagcagtgtgttgattcctcactaaactaaaaacaaaattaccatttgacccagtaacctcacaattgggtatatacctaaaaatatataaattattctatcataaagacacatgcacaatcacattcattgcagcactattcacaacagcaaagacacggaatcaacctaaatgcctatcaatggtagactggataaagaaaatatggtatggttgggcatgatggcacatgcctgtaatccagcactttgggggccaagccaggtggattgcctgagctcaggagtttgagaccggcatggacaacatagcaaaatcccatctataaaaaaaaaaaaaacataaagaaaaattagctaggcatggtggcacaagactttagtcttagctacttgggaagcttaagtagaagaggactgcttgagcctgagaggttgagagtcagcacagaccctgattcagggctcagtcccacaacattgtcctcactgcagatgccagtcacaaacttcatgggctcatctatgcttctgacctactgtttaaaaattggggactcccataacctttctgaaattcaataatctgatagagctactcacagaactcagcagaacactgtagttatatttacaggtttcaaataaaatatacaacccccaaaaagtcaaatggaagaaaagtatagaaccaagaaaagaggtgggaaaagatgaagcatatagataataaatagctgtgattaataaaattctctatcctctgtgttctccagtaacactttatgaaaagaaacacccttcccattatgacttagatggtactctctttacttacctaatacacagccaggaaaacactctgcatattttcttctttttctcattaaaaaagcagctgagtttgtcttcagtggtcaacataaaatacttcttaatcaaaattcacttgtttattttcttcccacaggctcctgaactctgagctatgctcagtctgagccaccatacaacctcattttatgtccctactaagaacacacagactttagggtaaaacattgtctgatctaaaatctgattatttcacccttcatttaaacattcccctcaccttttttctaatcttatttgcttttccctaggaaaaaaagcccttttctacctaatctttgcaatccttaaagatcttatagttggtacttcctcctgttgcaatactcctttggaattcttttttttttatatatacatctaactggtttattttaaaatctctcaaaactgcctcaaaaaagtaacaattttatcttcagtaagacactcccaaaccccttctatcttaaccttaactgcatctgtctgtggggccccagctttccaaggctctgtagcttctctcactatagaggcttcttccatggctggggtaagcaggctgggacatctgcaggaaaggctttccagaaggaactaactgggcctttaataacctccttttgccggctcaaaattaaccttcgctcgcagtcattgggctcaagctttaattaccatgtcagagtcattcacttagtttttgaaaataagtgtttgaaaaatccagcaaaatgattcaaaaacatataagaaaattttaaggtgcttacattttgtacctcagtaagagaagcaaatgtatttatttcttttggacaataaagtattattttattttttgtattaaaaatcatgtggtaaacagttacatgggaacacttctaggaggtaccaaatttcatcagataaaatttagcattaaactcagaaattgaaataacaggatatagaacaaagatatttactttagcaagtttaccctgcaaaaaaagaaactgatgttttcatgaaactatgtaactcaccaattatctaccacattttcttgtggaaatacattaattctctacagccgaaatggaagaaaaatttttcttattttttttccttggtagctaacattctaaaagctagatggaattctgtttgaaatcattcagccataaaaaacacacctgaaggccaggcatggtggcttacgcctgtaatcccagcactttgtggggccaaggcaggtggatcatgaggtcaggagatcgagaccaccctggctaacatggctaatatggcgaaaccccgtctctactaaaaatacaaaaaaattagctgggtgtggtggcgggcgcctgtagtcccagctactcgggagactgaagcaggagaatggcgtaaaccctggagacagagcttgcagtgagccgagatcccaccattgcactccagcctgggtgacagagcaagactctgcctcaaaaaaacaaaaaaacaaaaaaaaaaacaccagagaaaactcctaaattcactctgagaaagaaaaaggtgaatgagaattttcaacaaataaaatatacagatattattttctgaaactcacctttttatgctctttgtaaatattttcttacctttcaagccctactaataaaatgcaatttacagttaaaaaactgaggtcagccgggcacagtggctcacacctgcaatcccagcactttgggaggccaaggtgggcagattacttgaggtcagaattttcagctcaaacagcctggtcaacatggcaaacccccatctctactaaaaatacaaaaagtagccaggtgtggtggtgggcacctgtagtcccacctacttgggaggctgaggcatgagaatcacttgaactcgtgatgcagaggttgcagtgagccaagattgcaccactgcactacagcctgggcgacagaggaaaacactgtcaaaaaaaaaaaaaaaaaaaaccaaaaaaaaaaaaaccctgaggtcaaaataagtgaacaatgcatttaatcatgtcaaggtacggatatgtctgactcatgtgtcaagtcaggccatccaattacttgagagattctcccaccccatcctgttcacttaagtgctcaataatcattctctcaggagactctgaactatgccccagagtgccccaggtatattttactttgcaagtttttgcaccatctcactggggtcagttgtttttgtctttggagtgctattttatttcacaaaccttttaccatttttatttcactatttttctgtcccctaagagaatgcaggggcaaaaattattttggtttccccttcaataccagcatctgattgtctgaacagcaatgtgtctccaagaaatggaagctgggttgggtaaagacaatattaatatctcaagggagtagctttccaaaaaaacagcacaccagaagatgactcagccacagtgcattcacctgctctcttgagaagctacgcttcatatctcaggttgtcttatgggagatcagaggctacactccatacctcaggttgtcttatgggagaaaaagacccaggagctgatattcactagacactctcacagacatagccatggcgggtatcttggtttttccccagacagtactgaatctcaagtccaagaaaaaactgaagggtggctgaggacacatctccctataaagtttccaaagggaaatcttgacccaaaaacattgtgatatctgtgtctacggaaaacagaagaaaaaatatttacaaacagaaaacaaatctttttaaatgtgccatcaaatgctttgtcaaaaaatgattaaaataggtatcaaaatgtacactaaactatttgttgataatatgaataagggaggggaaattggcatttgggaatgtcagaaggaagtgaaaatcaagtattttactgcaagccagagtcaggccggagaaataggggatgggggatggacttgaggccctacttgggacacatgtgaaaaatgcaaggaaacagcagttccctgtggggtgtgaaaataattaagtggctggcagttagactgaggaggctgtagttcctaatttctacttttaaaaaatctaattcggccaggcgcggtggcttacacttgtaatcccagcactttgggaggccgaggcaggtggatcacttgaaatcaggagttcaagaccagcctgaccaacatggtgaaaccccatcgctattaaaaatacaaagttaacggggcgtggtggcgcatgcctgcaatcccagctacctgagaggctaaggcaggagaatcgcttgaacctgggaggcggagattgcagtgagcccagacggcgccattgcactccagccagggcgacagagtgagactttgtctcaaaaaaactaattcaaatgcattttttgtaaattactatattgggggaaaaaattcaggcttaacaaactataaactgccaattaacctctgattacataaccaagaaatttccatcttgatagtacgaattaagaaactacgtaactgtacctaaccaattatcgaatttggttttcttcattaggcaccttataaaactcttccgtcaaacctcttcaatagaccataaactacaacccatagctgggtgctctacaattttggaatcactctttggttaaattatttaatatttgtgcggtgacttctgcaaatttttaataggagaaaacaggggctgggaacctcacggaccaaagctctttccattcttgaacccacacgccgagtcaggattctcctgtgacgaccctcccatgctccctgcacatctgagagagactccgcgctgcgggtgcagagcggccccaagagggctccaggccagggcacaatcacagcgcagggaaaagacaggacgcccggggaccgggtgtcagcgcagccgccatcttatgcctgaagcggactgaggtcgagctaggcaaggagaacacggggcacagattgtggagctgactgagaggaggcctgagtcccgccacagccacttcccaccggttccaaccagcggctgccactctctcgggatgtcggacccggctgactcaccatttctaggcttccgggggtcctggcgacttagttgtgaatctcccaatacctgcaggtcacagggccatagaagctgggcctttaggagcggacgacacacagcagtaaggacgacaccttgacctccgcgtgcagcgagagccaacggtcctaccacatcccggaagccgccctgtccgctccagctgcgtgcctgattggacggtcccagtccagcgtccctgattggataatgtttaaggccccgccccttcaggccctgagtgacggaagatgttatcagatgctgggctgactgaagaaagagtgccagcccagtctgccgcaaaggccgggcgtgatggcttacgcctttaatcccatcggtttgggaggcggaggcggggggatcacctgaggtcagaagttcaagactagcctggtcgacctggtgaaactccttctctactaaaaatacaaaaattagttgggcgtggtggtgggcgcctgcaatcccagctactcaggaggctgaagcaggagaatcatttgaacccaggaggtggaggttgcagtgagccgagatcgggccattgcactccagcctgggcaacaagagtgaaacgccatctcaaaaaacaaaacaaaaaaccctaattttagtaaaatcttataaataaatccatcaaatttgtcatttttgaacgctctagattttcatatatattttataatctcttttttttatttgtttatctttttgagacagtctccctctgccgcccaggctggagtgcagtggcaggatctcggctaactgaaagctccgcctcccgggtgcaagtaattctcctccctcagcctccccagaagctgggattacaggcgcccgccaccacgccctgctaatttttgtttttttagtagagacagggtttcaccacgttgaggccaggctggtctgaaactactgacaggcaatccgcccaccttggcttcccaaagtgctgggattacaggcttgagccacggcgcccggccttataaacgcttataattttttaactctttcgattttattagacttttttttttaacttgaaacaacctttattttattttatttgagagtcttgctctgctggccaggctacagtgcaatggcatgatctcagctcactgcaacctccccctcttgggttcaagcgattctcctgcctcagcctcccgagtagctggattacaggcgccctccaccacacccagctaatttagcatggtggcctgaacctgtagtagcagctattcaggggctgaagtaggaggattgcctgagcccaggaggttgtgtctgcagtgagccctgatcaagccactgcactccattctgggtgacagagtgagaccctttctaaaaaaaaaaaaaaaaaaaagccaaagcatataaacttaaacttatgagagtttgggggttttatttttgtcttaaattattatatttcaatagttttggggtacaggtagtatttggttacatggataagttcttttgtggtgatttctgagatttcggtgcaccaatctcccaagtagagtgcgctgtacccaatgtgtactctttcatccctcatcccctctcccacccttcccactgagtgcccagagtccattatgtaattctttttaatttttaatttttttttttttgagacagagtttcacttgcctcggcctcccaaagtgctgagattacaagcgtgagccaccgcgcctggccccattttgtaatttttatgcctttgcatcttcatagcttagctcccacttataagtgaggacatacaatatttggggttttatctctttttttcttttcttttcttttttttttgagacggagtttgctgtaattacaggcatgagccaccatgcctggcctagtttttgatgttttgattatggtcttttctgtttgtttgtttgtttgtttttgatggagtctcgctctgtcgatctcggctcactgcaacctccgcctcctgggttcaagcgattctccagcctcagcctcccgagtagcagggattacagacccatgccatcgtgccctgctaatttttgtatttttagtagaggcggggttttaccatgttggccaagctggtctggaactcctgacctcaggtgatccaccagtctcggtctcccaaagtgctgggattacaggcatgagccaccatgaccagccaattatggtcattcttgcgagagtaaggtggtatcacgttgtggttttgatttgcatttccctgatcattaatcattagtgatattcagcattttttttctatgttggctatttgtatatcttcttttgagaattgtttaagtcccatctgtctttgtttttgttgcatttgctttggggttcttgttcgtgcactctttgcccaagtcaatgtctggaagagtttttccaatgctttagaattcgggtggtttcaggtcttagattaaagtatttgatccatcttgagttgatttttttataaggtgagagatgaagattcttttttttttttttttgagacggagtctcactctgttcccaggctggggtgcagtggcacgatctctgcctcccgggttcaagcaattatctgcctcagcctcccgagtagctgggattacaggcacccgccaccacacccggctaaattttttttgtagttttagtagagacggggtttcaccatcttggccaggctggtcttgaactcctgacctcgtgatccacccacctcgacctccctaagtgctgggataacaggtatgagccactgtgcccagccgaagatccagttttattcttcaatatgtggcttcccaattatgccagcatttattgaattgggtgttctttctccactttgtatctttgtttactttgtcaaagatcagttggctgtaaatatttgggttcatttctggtttcgctattctgtttcattggtctacatgtctatttttatacccatacaatgctgttttggtaactatagccttgtagtatagtttgaagtcatataatgtaatgccttcagatttttgtgtgtgtgtttttggttttattggttttttttttcttagtcttgctttgactttggaagctctctttttattttacataaattttaggattttttttagttctgtgaagaatgataatgttattttaatggaaattacattgaatttgtagattgtttttggtaggttgatcattgtcacagtaggattgctacccatccataagcatgaaatatgtttccatttgtttttgttgtctatgatttcttttagcagcattttgtagtttttctcatagagatctttcaccaccttggttagacatgttcctaattattttttttttttgcagctattttaaaatgagttgagttcttaatttaattcttagtttggtcactgttagcgtacaccagtgccactaacttgtgcacattgattttgtatcctgaaattttactgaatttatgtatcagattgaaaagcctttttttcttttttctttttgagacaaggtcttactctgttgcccaggctggagtgcagtagcatgatctctcggctcactgcaacctctgcctcctgggttcaagtgattctcctgtctcagcttccctagtagctggaattacagcctcttgccactgcgcctggctaatttttgtattcttagtagagacagggttttaccatgttggctaggctggtcttgaactcctgacctcagatgatccacctgcctccacctccccaagtgctgggattacaggcttgagccactgcacctggccctaaaagctttttagatgagtatttagggtttcccagctatacaattatatcattggtaaaaagtgacaatttgacttcctctttaccaatgttgtttattttttgctttactctgattgctctggccaagacttccattactatgttgaatagaagcggtgagagtgggcattattgtcttgttccagttctcagaaaaaatcctttcaactttttcccgttcagtgtaatgttggctgtttatcatagacagctttttttttcttttttctttctttttttcagacagagtcttgctctgtcgcccaggctggagtgcactggcacgatctccactcactgcaatttctgcctcccggactcaagcgattctcccgcctcagcctccccagtaactgggataacaggcacccaccatcatgcctggctaacttttgtagttttgtacagaccaggtttcaccatgttggccaggctgatctcaaactcctgacctcaggtgatttgcccaccttggcctcccaaagtgctgggattacaggcataagccaccgcgcccagcctgtcatagatggcttttatgaccttaaaatatgttccctctatcccgattttgctgaggattttaatcgtaaagggatgctggattttgccaaatgatttttctgtgtattttgagataatcatataatttttggttttaattctgtttatttgatgtataacatgtattgacttacctatgttaaatcatctctgcatccctggcataaaatgttctcgattatggtgtactatcttattaatatgctgctgtgttgggttagctagtattttatcgaagatttttgcattcatcaggaacattggtgtgtagttttcttttattatgtcttttcctgatcttggtattagagtgatattggcttcacagaatgacttaggaaggattgcatttttctctctcttttggaatagtttcagtaggactggtcccaattctttaaatgtcaggtagaattgagctacgaatccaccttgtcctggactttttttgttggcagtttgttttttgttttttttttcttgagtcttgctctgtcacccaggctggaatgtaatggtgcaatcttgactcactgcaacctctaacttctgggtttaagtgattctcctgactcagcctcccaagtagctgggattacaggccagcttgtgacctggctaatttttgtattttaagtagagatgggttttgccatgttgatcaggctgatctcaaacccctgacctcaaatgatccacccacctcatcctaccaaagtgctaggattacaggcatgagccactgtacccagccagcaattttttattattagtttaatcttgctacttgttattggtctcttcagggtttttatttcttcctggtttaatttaggagggttgtatattttcaggaatttatcgaactcctctaggttttctagtttgagcatgtaaaggtattcatagtagctttgaatgatcttttatttctaattgagcaaatttggaccttctgcttttctgggttaatctcactaatagtctgtcagtttggtttatcttttcaaatgactagcttattgttttatcttttatattttttaaatttcaattttatttagttctgctctgatctttgttattttttttttctgctgggtttggtttgttcttgtttctcttgttccttgaggtgtaatcttaggttgtttattgtggttttttgcactttttgatgtatgtatttcatactatgaactttcctcttagtactgcttttgctgtatcccagaagttttaatatgttgtgtcactattattcagtttagagaattatttaatttccatcttgatttcattgtgaacccaataatcattcaggagcagtttatttaattttcatgtatttgtatggttttgagtgttcctattggaattgatttctaattttattccactgtggcctaagacagtacttgataaaattttgatattcttaaatttattcaggggctgggcatggtggctcatgctttaatcccagtactttgggaggccaaggcaggcagataacctgaggtcagaagttcaaaaccagcctagccaacatggtgaaaccccatctctactaaaaatacaaaaattaggaacgcatggtggcacatgcgtgtaatcccagctacccagaaggctgaggcaggagaatcccttgaacctgggaggcagaggttgctgtgagctaaaattgcaccattgcactccagccttggtgacagagcaagactctgtcacacacacacaaaaaaaaaaaaaaaaaaaaaattcagacttgtcttgtgacttatcatatggtctatcttgaagaatgttttgtgtgctgatgaaaagaatgtatattctgcagttgctgggtggaatattctgtaaatatctgttaagtccatttgttctaaggtatagtttaagcccattgatttttgtttgtttcactttctctcctgatggcctgtctaatgctgtaagtaaagtataagtctcccactgtttttgtgttgttgtctatctcattgcatttcttaagggacaacttaggtgaaacaagaaaatttgtatttctgaagcatagagttaatattttaggctaaaatatatttttttctttgagacagagtcttgctctgtcgcccaagctggaatgcagtggcatgatcttggctcactgcaacttctgcctcccaggttcaagtgattcttctgcctcagactcttgagtagctaggactgtaggcacccaccaccatgcatggctaattgttctgtttttagtagaaacaaggttttaccatattggccaggctggtttcgaactcctgacctcaggtgatctgccctccttggcctcccagagtgttgggattatgggtgtgagccactgctcctggccttaaatgtaccatttatggtttttttaatatataatattatatgatctgcaaacatcaactctttacttacttgtcatcaatttcagtggctttaaacaatttttttttttgcctaactcttctgctacatacttccagggttatgttaaaatggaagcattgacaatggggacaatatagttttgcattgcattggtttttgtaaatttcattgaacgaaaacctcttcaagtttatataaagtggttacaagaggtaaagatcccatatttataggatgccctcttcatttgtaatagacagaggtggtaggttggtcacaaggctgctggttctacatagggtttacctttagttggcttgttaaaaaaggcttgggtagttgtaattcccattttattattggacagactgaatatccttcaggactttcatctgtagagcagacactaggggaagttgttgcagtcaggtctgcatatggtggggcttacatcaggatgtggatgaggattcctttcactgagtactagagagggtcttcccaggtcactgtgtgggattctaccaaggcagaattgtccatgaactgtggcttggaactagaagtaaaacattaaactgtatggctacaaatgggaatcttcctccaggtctctggaagagcaggagctctcccaggctgtggctgggaggagtttggaatggttataaggtaagttcagaattctcagtgggagcaagttgggttggctattttttggtctgtagccaagaagagatgtcctgtagtttgccaccttaatagaagcctgtctcctgaaaagaacatacctcaatcttgggctttaggagagtttcacaactccatccctggatctcaacttaccttttaccttagaaggaatatcttgacaggccctagaccactggacccctagaaattttactgaggtagaaggtccctaaattttagtcagttttattttccatcctctagaatgtaaatgtctcataaataagtccagtgtgtttgctatttcttgctcattggattcaatcagcataatgtcatcaatgtaatggaccactgtaatatttgcaaaagcaaaaagtgacagaggtctctttgaataagattatgacacaaagccagagagttgatatatccttgaggtagaacagtaaaggtatattgccgactttgccagctgaaagcaaattgcttctggtgggccttatggacagcaatggagaaaagggcaattgctaagtcaatgtctgcataccaggtacaaagagatgcgttaatttgctcaagcaacgaaaccatatctggtacagcagctgcaactggagtcatcacttggttaagcttacaataatccactgtcattctccaaaatccatctgtcttctgtacaggccaaacgaaagagttgaatgaggatgtggtaggaatcaccgcctctgcatcctttaagtccgtgatggtggcactaatctctgcactccctccatggatacaatattggttttgatttactattttcataggtagaggcagatctaatggcttccatttggcttttcccaccataatagccctcaccctactagtcagcaagccaatttgggaattctgccatctgctaagtatgtctatgccaattatgcattcgggcactggggaaatgaccacaaaatgagtcttgggactcactggaccaactctaagttggacctgtgctaaatctctattaagtacctgacctctataagcccctattttaactggaggaccacagtgatgttttgggtccccaggaatcaatgtcagctcagagccagtgtttagtagtccccaaaatatccaatcatttcccttttcccagtgcactgttacccccataaaaggccagagatctacttggggaaagatgggagaaagattcactggataaattgttggtagtgtagtggggttgctcttcaagagaatccagcctcccctttattcaaggggttctgggtctgtaaactggctcaagtctggaaattgattgaggggccatgattctctgtttttatatttcaaattagtcttctgcccattcaacctagaatttttctgcttgtataaattaagtaggaatgcagtaggtttcctatcaattttacttctaggaacatcgtgatgaatcagccaatgccagaactctacacaagtcagactgttctgattgccattttgcctctgctgtccattacagtagctatgcccaccttgcctttgatggtcgagtgccaccacttggcccctgccacctcgggatccaattattcccattgtatttacattttttagctgagtgactgcggttcccattgttggacctgacatgcaaagaagagcaattacagggctcttcaaagattcaggtgctgccctcacaaatctattttgcaaggcaatggtcaagggtatatattttggaccttccctgctggaattagtaggtctaaagtgactaatccactccagtatcgcaatctccctaagccttttgatctctccctctacattaaaccaagggacatcaggcatttccagctcactcacagtgggctatcatttttttttttttttttttttgagacagagttttgctcttgttgcccaggctggagtgcaatggcacaatctcggctcactgcaacctccacctcctaggttcaagcgattctcctgcctcagcctcccgagtagctgggattacaggcatgcaccaccacacccggctaattttgtatttttagtagagacagggtttctccatgttggtcaggctggtctcgaactcctgacctcaagtgatccacctgcctcagcctcccaaagtgctgggattacaggcatgagccaccacacccggccagtgggccatcttttaatccatatttcagctaaccaagcaaagaaactattagaaacttgtttaactccccaacctgcaacattaaatgcagtgttcctatttagtggggcctaataaataaattctgcctgattcaaccctatgttccttccaccattatcccacacccttaacattcatctccaagcctgttctccaaatttctatttatataaattagaaaactcaagcagttctttttgagtgcagtacaccttctcatggggaacactctcaacctcacctctgaaggtccactgggactttagtctacttatatgccaagaagcaaacatgggtgttgaggttggctcctgagaagaatcaacattattttgcctgggaactgcctcagggaaggccatcactgttgcctcaggcagtgcagggtttatttcaaaggtggaaaggcagcagggatcagaaaggggatgttaccactactggggatggggaagctctttcttctaacagaaaaggttcatcggagtttgcaaactcagtcaccccggcttcatcagggtccttccacacatccccattccaagtggcagggtcccattcttttccaataaatgccctcactttaatagtagacacctggcgaggttgcccatacaccttttgttgcagatcagccactagcacaataacagtttgtgtctgtttttccacaatttcagctctttctctacaggagatgagactctcactcagggtgatcttagcagatttgaggctcagtatctgcttctaaagccaaaagatagaatccctgagttcatcattttatatcatctctctgtccactgaacttaggacaaccagcttcattatgttcctttgttctccacatatggtcaaaggttgtttttgttttgttttgttttgagatagactctcactctgtcaccaaggctggagggcagtggtgcgatctcagttcactgcaaactccgcctcccgggttcaagcaattctctgcctcagcctccggagtagctgggattacaggtgcctgccaccacacccagctaatttttgtatttttagtagagatggggtttcaccatcttggccaggctggtcttgaactcctgaccttttgatccacctgcctcggcctcccaaagtgctgggattataggtgtgagccactgcgcccggctggtcaaaggtattatgtatagagtcactaaactccttgcctcccatgagtgatagtgtcatatgcatttattttacataacttcttaaactgttcatcccaagggctatcagtgttctccatactattagaagtagagtctttagcatttttgggtctaatcatattaagcagccaactccagaaaccccagaatcaaaaaagaactctatacttaatattcttttcctctagaatcactcctggtaccaaaatctgtattagtcagggttctctagagggacataagtattaactcacacaatcacaagatcccacaatagactgtctgcaggctgagaatgaaggagagccactccgagtcccaaaaatgaagaacttggaatctggtgttcaagggcaggaagcatccagcacaggagaaagatgtaggctgggagactaggccaatctctcttttcacatttttctgcctgcttatattctaaccatgctggcagctgattagattgtgcccatccagattaagggtgggtctgccttttccagcccactgactcaattgttaatctcctttggcaacaccctcacagacacacccaagattgatacgtcgtatccttcaatccaatcaaattgacactcagtattaactatcacacctagttaaaagagtcaaccaacatccctccatttggctgaatccaggtgaaacagtcatcaccatttttctaagctgaatccagaaatgagtcagcattccacctatgggcagactcacatatcacagtcacaattccaatggtgaatttttttgatgtgtgagatttagaaccttaccagtgggctctgtttatatgtgaaggtgacaatactgttagctttgtttgtgtattaaagggtcaatctcacctgtgtgctgggcctgtgataaaactttgtactgccagagggcttcatgtaatttccattaactgtaataatcttctgtgagtctcatacaggtaggagaccaaggaccataccagtttcctcaagcctagctataatagtcaacatatcttttattggctggatccaggtatgagagttatcaatgtgcctgtgagctaactttataaataggtcaacatcacacctgtggctggatctacatatgacattccaactgcggactgtgtccatgtacaagattcaagacctaaccagaggtctctgtccatgtgtgagggtgacactcataacttttggcaggatgagcatacgagatacttcacctgtgtgctgggtgcagttatatgtcaaaatcccacctgtggaaaagaaacaagctaagagagtcacatattttaaattctaggctaaagatatgttaaaatatgccttgcaggcggggctcaggaaagagagttacatcacctgagtgctgtgacgggtgatatgtcacaatgccttctatgggcatggctcaggcaggagttttacattatttttgtgttggccctatgatatgtaacaatccccctccatttgcatgacctagagaaaatagaagagtcacagcacctaaattatgaccatagagatctatcatgatacctcctatgggcagagcctaagatagagggtcacatcacctgcaaactgggctcagtacaatgtttcaatctcccctgaggccagagcccaggcagaagaggagagttatatcacctaagtgcttgggcctgtggtatgtcacagttcatttttggggggtggcagaatgcaggcaaaggaggagtgttacatcacctaggtaatgggttcagaagtatttcacaatacctactgtgggcagggcccaggcagtacagtcacatcatggagatgctgggctcagtgatatctcacaaagactttgtggacagggcccaggctgaaaataagagtcacatgacctaagtgctgggcccagtgaaatttcacaataccctctgtaggtagggcttaagcaagagagtcacatcacaatcttttctgagagctgggcccaggcagggaagtaaaatcactcaggtgctaggcaaaagtatatgtcacaatcatacctgtgggaagatctagggctaggattcacaattccacacatgtcccagcttcaggtaaaaagcgtcaacacctcctgtgagttgcatccaagtacatgagtcacagtatcaatgatgaactggatccatgcatgagagtcccaattccacctgcagactgtgtattatgttggctttatgatatgtcaaaatccgcctccatttgcatgacctagagaaaatagaagagtcacagagccttctgtgactggtatcagagtcaaagccttctaggtgtgttgaatcctggtcttagagtcaccatccacctgtagacaaaatccagtaaaacaattacaatcccaactttcgactgcatccgagtgtgagattcagaagctcaacagttttctgtatccatgcaggagggtgacaatttttactaggcgctagaagtgcatatgagaattaaaatctcagcttgttctgggtcctcttatgacactctctgtaccaccccgagggctttacattgtttgggtgagagtcatcatctgctgtgagacattagtgctggtataaattcatgatcttgcctattgccctaagcttaggtatgaaagtcaacatctctcctattgtctgggtccaggtatgaaagtcattgctgtgcctcttagttgggttttatgagtcaccctcccacctgtggttggatccacacatgacattaaaaattccaactgtggactgcatctgtaagtgagtttcaggacttcacaagtgggttctgtccatatatgtgggggacaattcttactgtttgctgggtgtgcatttgagagtcacaatctcaaattttgctgagttatgtaatgacactttttgtacaacctgagggcattatacaatattagtgagtgtagtaatcctctgtgacatttatacaagtagaaaacccaaaaccttacctgttgccctaagcctaagtacaagcatcaacatatcttctattggctgggtttattgtgcaagtgaattgggttcagaaatttgccaccatccaaccggcggaataggttcatgtgtgaggttcaggacctcaccagtaagctcagtctacatgtgagggtggcaattcaaactgttggttaggtgtgtataggagagtcacaatctcacctgtgtgctcagtcttgtaatgacactctgtattgcccaaaagctttatacaatatgtgtgagtgtcataatcttctgttaccttcctacaagtaaaagacctagacccctaagcctagctaccagagtcaacatctctcttattggctgggcccatgtttgacagtcatcaccatttctgtgagctgaatccagaaatgaatcaccatcccacttatggcaagatatacatatgacagtcacaattccagctgttgactgcattcactcatgagactcaggacctcaacagcagtctttgtccatgtgttatagtgacaatagtaactgttgtatgggattgcatacaagaataaaaatctcatctgtgtcctggaccacatcatatttcacaatcttatctgtgggaaaggttaaaaaatgagagtaacatcacctgaattcttcacctggaatatgtctcaatctcctctatgggcaaggcccagactggagaattggatcacttgcatgcagggtccggtgacatattataatattttctctaggcacagctcaggcaggagagtcacaacatttgggtgctgggctcagagatatgccacaatcccttttttgggcatgtctcctgcaacagagaagaggcacattatgtagaaaattggtacagggatttgtcacaatgtccccttttggtggtgcacaggcaggtgaggagagtcacatcacccagataatgggcctagcaatatatcacaatgccccctgatggaagggcaaagacaagaaagtcacataacctaggtgagaaaacctgacataggtcacaatgcatgttatgagtagggatcatggaaaagaggagagtcatataacctggaggctgcactcagataaatgtcataatcatcccagtgggcagggcctaggcatgagaggagagtcacatcacataaatgctaggcctagcgatatgtcatagtccccactgtgtacaggtcccagaataaagtaaagagtcacaccatctacatgttgggaccaaagatatgtagcaattacacctgtgggcaggggtcaggcagaagagccacagcacctgtgtgctggaccctgtgataagttttttttttatttatctgttggcatggcccagtcagaagaggcaaatcaaaccacctgggttctgggcccagtgatatgtcacaatgtcttccataggcaaagcccaggtaacagaggagactcacatcaaataattgatggacccagagatatttcacaatgcccgctgtgagcaagagccaggcaagagactcacatcacttttgtgctgggccactatcttttgtgtgagcagaacataggaaaaagagaagcattggccgggcgcggtggctcatgcctgtaatctcagcactttgcggggctgaggagggtggatcacctgagatcaggagtttgagaccagcctgaccaacaaggtgaagccccgtctctactaaaaatacaaaatacaccaagtgtgatggcaggtgcctgtagtcccagctgctcaggaggctgagacagaagaatttcttgaacccaggaggcagatattgcagtgagccgagatcgtgccactgcactccagcctgggtgatggagcaagactccatctcaaaaaaaaaaaaaaaaaaaaaaaaaaaaaaaaaaaaaagagagagaagcatcacatcagcagagtgctgagcccagatatgtcccaatccccctgtgagcagaatgcatgcagaagagagtcaacatacatggatgatgggcacagagatatttcataatgtccactgcaggaagggcacaggaagaagtgtaacatcacttgagtgttggacagtgcaatatgtcaaaatagccaatgtggtcagggcacaggcagaaatcacataacctgggtgcagggcctgacagtgcatcacagtgtcctctatgggcggagccaaggcaggagaataggtcacatcagctaagtgcttggccaagtgatacgtcataatccctactgggggctggaccgaggctgggaagtcaaatcgctcagattctgggcagaagcatacatcagaattacaccagcaggaaggtcctgaaatgaaattaacaatcccacacatgtcccagtttcaggtatgagagtcaacaccttctgtaggtttggtttaagtacctgagtcacagtttcaacaatggactgaatttgtacacaaaagacccaatcccttctgaagactgtgtccccttattgaagccacagcctcacagccatgaggaatcttggtctgagagtaaccaacccacctatggatcagatccacatataagagttaattattcaacttcccattgcctctggttgggagattcagagcctcaacagtgggctgtgctcatgtgaaaggatgacaatatttgctattggctacctgtgcataagagtgtcacaatattacctgtgtgctgggtgctgtaaggacactttctctaccattcaagggctgtatatgctatgcatgagagttagaatttgctctgagacctccatgctagtatgaacccatgattgtcacccgtggccctaagctcatgtatgagactcaacatctctttaattgacttggtccagataggagattcctcaactgcctatgagatggctttagaaatgagtcgccatctcaattgtggttggatgtttacatatgacagtcacaattccaactgtaaactgcatccgtgtatgaagttcaagacctcaccagtaaactgtgtccttgcatgaatgcaataatcctaataattggtggggtgtacacacaatataaacaatctcacctgtgtgttgggcactgtgaagacactctctgtatcacctgagggctttatacagtatgtgagggagtggaaattctctatgacctttctacaaaaaggagactcaggatcttacccatttctctaagcttagctacaagagacagtatctcttctggtgactgttatgagagttattattgcacctgtcagccaggccaagatgtatgttacaatcccatttgtcagtagagagtgagcaggatggtcacatcacatgagtgctgggaaagggttatgtcacagtcatttttgaggccagggaccagggataaaagaaatatcaccttagtgctaggccaagggttatgttccactgttttctgtgggcaaggtgcaggcaaaacaaactcatcaccttgttactgggcccagtgatatgtcacaattttcactgagggcaaagtggaggctaaaaacaagggtcatatctcttaggtcatgatgcagagatacatcacaaggcctcccgtgggcaggccacaggtagaaatcaccaatttcctaggtgttggagcctgtgatatgtcaaaacacacaatgtatgcagggcccatgcaggagagaagagtcacataacttaggtactgagcctagcaatacatcccaatttcttcttggacagagcccaagagatagaagagtcttattacccaggtgttgggtctagctatatgtcaaaatattctctgaagggagagatcagggaggagtgtaacctcacctaggtcagaagcccagagatgttgccgattctgtgtaagtctcaggaaaaagagaagagtcaggtatcctagaaactaggctacattatatgttgcaattatccaagtgggagggttctcatgagaagagagtcacaacatgtagctgctgagctaaacgatgcatcacaattcccactgcgtactggtcccagaaagaagaggagagtcccatcatctaggtgatgggtccagaaatatggcatacgcatcctgtgggcaagcaacaggcagaggtatctcagcatgtctgtagtaggcccggtattaagttactctcccttgtatgggcatgatccaggcagaagaagtcacatcacctaggtgctgggcccagagatatatcacaatatcttttgtgggaaaagacaaggtaaaagaagagacatcaaatagttgatgggtctagagatatgttacaatctttctgtgggcagggtctaggcaggagactcagtcactgtggtcctgggcacagcactatgtaaaaatgctttattttggaagagccaaggcagaagaatatcacctgtctgttagcccagcgacttgtcacaatatcccctgcaaactgaaccttgaaagaagattagagtaatgtcagctaggtgctggccccaattatttgtcaaaatccttcttttgaaaagaaattggtagaagaggattatcaaaacacaaagttgattggtgcatagatatgtcacaaaaatccttgtaggcagggccaggcaggagagttacatcacctgggtattggacccagcaacatgtcaaaattgcccatatgggcagggcacaggcaggggactcacataacctgaatgtggtgccaagtgatatgtgacagtgccccctgtgggcagcatgaaggcagaagagactcacatcacctggatgcaaggccaagcaatatgtcacaatgttcccttttggcaacgctaaggcaggagtatgcagctgcatcacctaattgttggttttgatgaaattttataatttcagctgtgggctgggcccagggagtagagttaaatcactcaggtgatgggcagaatctatgtcacaatcatatctgcaggaatatccaggtatgtgattaacaatcccatatatgtctaggttctaggtgtaagattcaatagccggccaggcatggtggctcacgcctgtaatcccagcactttgggaggccaaggcagacagatcacctgaggtcaagattttgacctcagatggccaacgaggtgaaactccgtctctactaaaaatacaaaaattagccaggtgtggtgccaggtgtctgtaatcccagctactctactcaggaggctgaggcaggagaattgcttgaatccaggaggtggaggttgcagtgagccaagatctgccactgcactccagcctggggaaaaagagtcaggctccatctaaagaaaaaaaaaaaaaaaaaaaaaaaattcagcagctcatgtatgttggacctaagtaaaggagtcacaatctaagtggtagaataatctgtccatgagacccttaatccctcctgtgacctgcttctccttagtgaagtcacagcctcagacttgtgttgaatctgagactcaccatcccacctgtgaatgggatccaggtatgatagtcaattttctaacttttgactgccttcgagtctgagattcagaagctcaatcactggctgtttcatgagacagaatgacaatctttactgttgactgggtgtgcatatgagtggcacagtctcacctgtgtgctgggctctgttggaacacattctgcaccgcctgagggctttatgcagtgtgcctaaaagtcacagtctgctctgagacctttctgcttttatagacccatggtcatacctgtgaccctaagttcaggtgtgagcatagttggcagggttcaaattagagagtcctcactctctagtcagcagggtctagactggagagtcgtcacccacctgcgcactggatttattaatgagtcaccaccttaattgttgccggatgttaatatatgacagtaacaattccaactttgaaccatatccacctgtaagattcaggacctcaacagttggctgttgccatgtgtgagggtgacaatcataacagttggcagtttgtgcattgtagaaacaatctcacctgtgtgctaagccctgtgaagacactctttgtggcacccaaaagtttatagaacacactaaagattggtaattcattatgacattcatacaaagagaaggcccagggtcttgtttcctaatctacactacaagagacactatctcccctattggctgattccaggtatcatcatagcacctatgagttgggccaggatatttgtcacaatctcacctgtaagtagaaaatgagcagaagagtcacatcacctggatgctgtatgaggaatgtcacaatattttctggaagcagggcacaggcagaagagtcacataacctggtggctgagcccagtgatgtttcacaatgctccctgtgggaaaagacctgccagaaaagacacatcacctggttactgggcagagctatatgtcacaatcttctctatgtgcaggctgcaggcagaaaaagagtcacatcacttaggcgatagatgcagacatatgtcacaaggccgcctatgggcagggcttattcagtagcctctgatccaatcctgtaggtgttgggtccagcgacatgtcacaataccaaaaatatgcatggctcagcaaaagaaaagatttacatcatctaggtactggatccagtgatatgtcacaatcttcttttttggcatagctcaggaagaagtagagagtcacatcaccaaggtgttggatcaagccatatgtcacaatacacaataaatgcagggctcatgaaaagatgagagtcaaatctcttaggtgtggaacagtggtacatcacaatttctcctttgtcagagccacatcacctaggtggctggcccagtaatatgtcacaattcccttgagaggtgagcccaggcaggagagtcacatcatttcggtgagaaccccacagatgtgtcattattttccctgtgaatagggctcaggaagaaaatgacagtcacatcatttaaatgatgggcccagagatagattacaatggctcctgggtacaaaaaccaggcagaagaattacatcacctgtgtgctgggcccagtgataagtcactttcccttgtgtgggcatggcttcagcaggagagaagcgtcacatcactaaggttctggttccagagatatgtcacaatctctcctattgacaaagcatgggtaggagaggagagtcaaatgaagcagttgatgggcccagagatatgtcacaatgccccccccccccccgcccgtaggcagagtacaagcaggtacctcccaattctttagatgttgtggccagggacatgtcacaatacttaaaaaatgcaggacacaggcaataaaacaaagtcacatcacctaggtgctaggttcagcgatatatcacaatccctaattcaagaggggagataaaaagattcacgtaaccaaggtgttaaatgtaaagatatgtcataatattcctgtgggcagagaccattcaggagagtcacattaccttaatgttggacccagccatatatcacaatacacagcatatccagagttcaagcagggaagaaaaatcacatcatctagttgctgggtttgataatatgtcacaatcacttgtttttgtagaacccagacagaaaagaagagtcacatctcctggttgatggatgcagagataagccaaaagactccttgtggccaggacccaggcgggaggttctcatgccctaggtgtttgtctcagccatacgtcatattaccaaatatatgcagggcccaggcaaacaaggagagtcataacaccttggtgctaagtttagtgatatgttacgatccccacttttggcagggccgggacacacacacacacaaagtcacatcacctaggcagtataaaaaaagatatgtcataatacccctgtagacagggtccattcagaagagtctcatcacctagcttttagactcagttatttgtcacaatacacaatttatgcaagactcagtcaaaagaggaaagtcatgtaacctaggtgctgggtccagtgatacattacaatctctccttgggtaaagtccaagcactagaaaagagttacattacctaggtacttggtccaggaatatgtcacaatacctcctgaggaaagagcccaggaaggggagtcacatcacctaatcgtggggtccaaagatatttcccagtgcttcttgtaggtagagctgaggataagcaaaagagtcacataacctaggggctgggcccagctatatgtcacaactaccccaggtggcaagtctctggtatgaaaggagaatcacatcacatagatactgggccaagcaatatgtcacaatctccactgtaggaaggtcccaggaaaagagaagagtcacattatctgggtgacgggcacaggaacatatcataattaccctaagcatatgtgttactgtcatgcgcaaccgcgtgaagagaccaccaaacaggctttgtgtaagcaataaagctttttaatcacctgggtgcaagcgggctgagtccgaaaaaagagtcagcgaagggagataggggtggggccgttttaaaggatttgggcgggtagtggaaaattacagtcaaagggggtttttctcttgcaggcaggggtgggggtcacaaggtgctcagtgagggaggttctgagccaggagaaggaatttcacaacattaatggctcagttaaggtggggcaggaacaaatcacaatggtggaatgtcatcagttaaggcaggaaccagcaattttcacttcttttgtgattcttcacttgcttcaggccatccgcatgtattcctgcaggtcacaggggatatcatggcttagcttgggctcagaggcctgacagttaggtcacctgtgtgtgaggcccagtgataagccactcttccttttgtgcacagggtctaagcaaaagatgaaaagtcacatcacctaggtgctgggcttacagaattgtctcaatctctcctatggtcaaagccaatttaagagacataaatcatattagctgctctgcctatggagcagccatctttttgtttctttacttctctaataaacttggtttcactttactgcatggactcaccttggcttctttctttcttgcatgagatccaagaaccctttcttggggtgtgaatcaaaagccctttccagaacagctttttggcaaactataaagggactatactgatgagaaacctgacccaaaggaaataactacagcaccaattagcctgctttgggtaactagtggggtacatttttttcacacacgtccatgtgaagagaccaccaaacaggctttgtgtgagcaataaagctttttaatcacctggatgcaggtgggctgagtctgaaaagaaagtcagtgaagggagataggggtagggccattttataggattcgggtaggtaatggaaaattacagtcaaagggggttgttctctggttggcaggggttgggggtcacaaggtgctcagtgggggagcttttgagccaggatgagccaggagaaggaatttcacaaagtaatgtcatcagttaaggcaggaactggccattttcacttcttttgtgattcttcacttgcttcaggtcatctggatgaatacgtgcaggcatgggctcagagacctgacatttattaatattttcttatattaataagaaaaataaaatagtgttgaagtgttggggcagtgaaaatttttgggagtggtatggagagataatgggcgatgtttctcagggctgctttgagcgggattaggggcagcgtgggaacctagagtgggagagattaagctgaaggaagattttgtggtaaggggtgacattgtggggttgttagaaggagcatttgtcatatcgaatgattggtgatggcctggatgcagttttgtatgaattgaaaaactaaacagaagacacaaggtctgaataagagaaggagaaaaataggtattaaaggactaagaattgggaggacccaggacatccaattagagagtgtccaagggggttcagcataattacttgctttgctggcaagtttttgagctctatccttgacagagtcctcctttttaagttggaggttgagtttgctgaggtgtgtttttaaaaaaccattagtctgttctacctttcctgatgattgaggacggtaaggggtatgaagtttccactgaataccaagagcctgaaaaactgcttgggtgatttgactaataaaggccagtccgttattggactgtatagaggtgggaaggccaaaccaaggaattatgtcttacagaagggaagaaatgaccatggtggccttttcagaccctgtgggaaaggcctctacctaaccagtgaaagtgtctacccagaccaagaggtattttagtttcctgactcgagacacgtaagtaaagtcaatttgccagtcctgggcaggggtaaatccctgagcctgatgtgtatggaagggaggggacctgaaaaatccctgaggagtactagaatagcagatggaacactgagaggtgatttccttgaggacagatttccacaatggaaaggaaatgagaggttctaagaggtgggctagtggcttgtaacctacatggaagaggttatgaaatgttgatggaatagaataggcctgtgaggctggaaggacatggacatattttccttggtctaagaaccatttgccttgtgtgggaagagattcataggtggaagtttcagtgggggagtaggtgggagtgaccgatgagaaggagaaaaactggccatgagggacagaagttggaatgctagctgcttctttagctacctcagcagcataagcgttgtcctgagctatgagatctgacgtcttctgatggcccttgcagtgaatgactccagcttcctttggaagtaaagcggccttgagaagagtttttattaaagaggcattaaagatggaggacccttgcatagcgaggaaacctttttcagcccatataacaacatggtggtgcaggatatggaaggtatatttagagtcagtatgaatattgacacatcatcaatatttgtgagagtgagggttcaagttaaggcaatgagttcgacttgctgagagctggtggagggggcagagtggtagcctcaatgatagatgtggaagatactatagcatagcctgcctttgctgatgagcggcgagtaggcctggtggaactgccattgataaaccaagtgtgattagagtgaggaacaagaaagaaggaaatatggggaaatggagtgaatgtcaggtggatcagggagatatagtcatgggggtcaggtgtggtatccggaataatgtgggagcctggattgaagtctgggccaggaacaatggtaattgtgggaggctcaacaaagagtgagtatagctgaaggagctggggagcagaaagtatatgtgttagctgtgaggaagaaaatagattttggaagttatgagaactgtagagagtgagttgagcatagtttgtgattttgagggcctctaaaatattaaagcagcggcagccacagcacacagacatgagggctaggctaaaacagtaaggtcaagttgtttggacagaaaggctacagggcgcagtcccagctcttctgtaagaactctgaccacacagccctgcacttcagctgtgtgtaatgaaaagggagtgatgagttagggagagctagtgtgggagctgtttttcaaggaatggaaaggggagtggggaaaggatttaggatctatggggtaagctaggtttgcttttctgagtttatataatcgtttagtcaggatggtaaaactaggtatccaaaggcagaagtacctaaccatgcctaagaaggaaaggagttgttgttttatagaaagggttggggttcagaagattagccagacatgattagcagggagagcttgtgtgttttcatgaagaattatgccgagataggtaacagatggggaataaatttgggcttgacttaagtaatgggggctgtccgtgaagccttgtggcagtacagcccaggtaatttgctgagcccaatgggtgtcagggtcagtccaaatgaaagcgaagagaggctgggatgaagggtgcaaaggaatagtaaagaaagcatgtttgagatccagaacagaataacgggttgtggaggggttgtggagggaggtattgaggataggagagtatatgggtttggctccacggagtggataggcaaaacaatttggttgataaggtgcagatcctgaactaacttgtaagacttgcccagtttttggacaggtaaaatgggggaattgtaagaagagtttataggctttaaaagaccatgctgtaacaggtgagtgataacaggctttaatccttttaaagagtgctgtgggatgggatattggcattcagtggcataagggtggttaggttttaacaggatggtaaggggtgcatgttcggttgccaaggaaggagtagaggtgtcctatacttgtggattaaggtggggagaaacaaggggaggaggcaaaggaggctttgaactgggaaaaagggtagcaatgaggtgtggctgtagcctaggaatagtcagggaagcaaataatttagttaaaatgcctagacctgataagggaactgggcaggtggggataactaaaaaggagtgcataaaagaatattgtccaagttggcaccagagttggggagttttaagaggtttagaagcctggccatcaatacccacaacagttatggagacaagggaaacaggcccttgaaaagaaggtaatatggaatgggcagcctctgtgttgattaagaaggggaaggacttaccctccactgtaagagttactcaaagtgtctatgatggtccaggaggcttccgaggtgatcagagcagcatcagtcttcagctgctaagccgagaagatatgggaaagagtcagtcagagccttgggccaattggacagtccaatttccagtggggtcccacacagatgggacatggcttaggaggaatcctgggctgtgggcattccttggcccagtggccagatttccagcacttgaagtaagatcctgggggaggaggtcctgaaggaacacctgactgctgtggcttaggcgttttgaagttcttgtgtgctggagatgtggctggggtttctctcacagcagaggaaagtaattgcaactcttctctattattgtacaccttgaaggtgaggttaattaagtcctgttgtggggtttgagggccagaatataatttttggagttttatttaatgttgggagcagattgggtaataaaatgcatattgagaataagatggccttctgacacttcagggtctagggctgtaaagtgtctaagggttgttgccaaacaggccatgaactgcgctgtgtttttatatttgatgataaagagcctaaacgctaactgatttgggagaggtcagataaagaaaaaggagcattaaccttgactatgcctttagctccagccacctttttaagaggaaattgctgggcaggtgggggagagctagtcacgaaacaaaactgtaagccagaccaggtgtgagcaggggaggtgataaaggattatagggttggggaagagaggctgaggaagaatcaggacctgactcggcctggcaaggagcagtctggggaggagaggtcagatgggtctgtagaaaaggattcaaaagactcagtgacacttggggttgggactgaagggacaggtgggagggaaagaaggaggatttgggatgagttgcattgggaacggagactagggagggaccgatgtgtaaaagaatgcctggacatcaggcacctcagatcatttgcccatttttcaacaaaaatcatccaggtcttgtaaaatggagaaatcaaaagtaccattttctggctatttagaaccattatcgagtttgtattggggccaaacagtgttgcagaagaaaataaaatgcttaggttttaggtcaggtgagaattgaagaggttttaagtttttgagaacataggataagggagaagaagggggaatggagggtggaaggttgcccatagtgaaggaggcaagcccagagaaaagagagggtagagacacagagaaggggtgggtagtgagcagccctgggctgcaatgtgggtgagcagccaaagcaggcatccccacaattgacttgccactaaggaaatgtgggtgaatgaccaaggcaggcatcccagtggtgatcagacacaaatggagtgtgggtgaataattaggcaggcatcccagcagtgattaaacaccaagggaagactgtcttcccgagtctgtgactggcgctggagttttgggtccacggataaaagtgtctcctttgtctctactagcgaggaaaaagaactggaattggaaggacagggagattgaagggtagcaagagaggctggagaagagagtgaaaagacagcttacccaatttgaaattggtgagatgttgcttgggctggttggtctgaggacccgaggttgtaggtggatctccttatggagtgagggcgaggacaggggaccggtctcccaaaggagtcctcctatcctgggtcttcggcaccaaatgtcacgtgcatctgtgtaaagagaccaccaaacagtctttgtgtgagcaacaaggctatttatttcacctgggaacaggctggctgagtccaaaaagagagtccgcgaagggagataggggtggggctgttttataggatttgggtaggtagtggaaaattacagtcaaagggggttgttctctggcggtcaggggtgggggtcacaaggttctcaatgggggaggttctgagccaggagaaggaatttcacaaggtaatgtcatcagttaaggcaggaacaggccattttcacttcttttgtgattcttcacttgcttcaggccatctggatatatacatgcaggtcacaggggatatgatggcttagcttgggctcagaggtgtgacaaaaatcaagaaaaatacttcagtccgctgagaaaaattctttttccaacaaaacaacatccaagaaagaaaaacattaaggccttttttttttttttttttttttttgagacagagtctcactgtgtcacccaggctggagtgcagtggcacaatcttggctcactgcaacctctgcctcctggattcaagcagttctcctatctcagcctcctgagtagctgggactacaggtgcatgccaccacacccggctaatttttttgtatttttagtagagatggggtttcaccatattggtcaggctggtctcaaactcctgacctcaggtgatacatccgcaaggccttttaaatatacttataacttggatgtccacttttaattaagctgatcgctctttaagaaaattcttttaactcccttattacttaactttagccatgccaagcagccattatttctggcttccaaattttattagaagttcagagaaaggagaatcgaaggcagttcataaaggaaaaaagaattagcaaaaagcaaaagtcacacagacatcaaaccagaaagaactcattttctaagccaggattaaaccccagacaaccattgtaaaatcgcaaaggctagaacaaaacattatcatcgtcaggcctctgagcccaagctaagccatcatatcccctgtgacctgcacgtatacatccagatggcctgaagcaagtgaagaatcataaaagaaatgaaaatggacagttcctgccttaactgatgacattaccttgtgaaattccttctcctggctcagaagctcccccactgagcaccttgtgaccaccgcccctgcccgccagagaacaaccccctttgactgtaactttccactacctacccaaatcctataaagaggccccacacctatgtcccttcactgactctcttttcggactcagcccacctgcacccaggtgattaaagcgctttattgctcacacaaagcctgtttggtggtctcttcacacagacgtgcgtgacaaccatgtggtggttgtgacttaaaaccggatggaggcctgcagcaaagtttgctacagaccatacagcacacaaagcacaccagattggctacttaagatcaagctcacaaatttttcctacaataaaaactctacagaagatataaacagtgatgttcatcattcctggatcaacagaatgtcctccaaagagaaaaaaaagaaaacacgcttaaaagtcaactgctggctatgtgcgtggctcatgcctgtaatcccagcactttgggaggccaaggtgggtggctcacctgaggtcaggagtttgagaccagcctggccaacatggcaaaaccctgtctgtctgtactaaaaatacaaaaattagccaggcgtggtgatgcacgcctgtatcccagctactcatggaggctgaggcaggagaatcacttgaactcgggaagcagaggttgcagtgagccaagatcacaccactgcactccagcctaggtaacataagtgaaactctatctcaaaaaaaaaaaaaagaaaagtcaaccctgacaaggtagaaaaaaaagaaaagatgcctggggaagaacgtcttattcttatgcaaatgggcttctctaccagagagagaaacttcattgctccctaataaagtgggatcttttggctgggggagggcaagcctctatggatgcatggcagggagtgctggccagcctggcatcgggcaccctgtaaccatggactccagccctagttgggagtggtgtggggaagctgccattccctggtccatcctccacatacctgcagccattggggtggggtggggtgcactctcaaaggaggtctgaagagaaaaaggcttagaaataaaaggaaagaaggtttttgagtttgtatggtactcacccttcctcaagccccatgtctggaaaccaaaaatgttataggaaaaaaaccagtttcttgtaaaattaccaggaaatattaggttcacagacacatagaggggcgaggagcagaatttattaggcaaaaaggaagaagaaaacaactcaataaaatgagatggggtcctgctaacaagctctccacctcaccgattgaattccaggtccccatacaggaacaggagaggccaggaaactcctcctgcagacggtgtgaacttcctgaggctctgccccatcctcccagtgcataggccggtttgagattctctgaggactcatttttacttggctgtctcaatacataggcattagccttggcaactgacttctagaaatctgctatgcaattagagctttacaaacattaagcaaatattttatcatttaatctctgtggttttcttttcttttttttttcctttttcttgagagagactatctctgtcactcagggtggagcgcagtggcgtgatcacagctcattgcagcctcaacaatctaggctcaagcacttttgctacttcagcctctgagcagcagagaccccaggcatgtgccaccatgctcagctaatctcccatttttctttttgtagagataagctctccctatgtagcataggctggtctcgcatgtcattcacatagcccgtgaaaaagctggccctcctactttagccttttaatatgcaaaggcagggcgccatggatgttctacacacgtggagatatgtgggggtggccatgttgccaggaacatttggtgcaagggcaagaaggccacgagggaatcaccaaattgggtggaccaagtttctaagggcctgcatttgtatatcaaaagttgccagcctggctctaagagctggggctttaaaagaaacttttccagagatactttaaaaaatgaaaacttcccaaggacctattttcctctaatccacgtaaaataatttcttaataactcctaccacacagggctaggattacaggcatgagccactacatgcagacagaggttttatttttatatcaaaatataaaaatagcattagccaggcacggtggctcacgcctgtaatcccagcactttgggagcccaaggcaggcagttcatgaggtcaggagttcctagaccagcctgaccaatatggtgaaatcccgtctctactaaaaatacaaaattagtcaggcatggtggcacacacctgtaatctcagctactcaggagggtgaggcaggagaattgcttgaacctgggaggcagaaatggcagtaagccaaaattgtgccactgcactccagcctgggggacagagcaagacaccatctcaaaaaaaaaaggaaaaaaaaaaaaagaaaaaattagctgggtgtggtggcacatgcctgtaatcctagctactctggaggctgaggcagaagaatcacttgaacctggaaggcggaggtttcagtgagccaagattgcaccattgtactccagtctgggtaacaagagctaaactccatctcaaaaaaacaaaacacaacaaaaaaaaagaaagcaaattcaaataaataaaaataacaaaatatcatatagtatagataatatgaccagaaagaaaaaaaaaagcttagctttcctgactttaagctgcattagtactatagtactaatagaatatccttagtgaagactattctatttccataaaaaattcaacataagataattttcaggttttagaaattgatgaataacataatatagaaaggcagcaatgtgttcccatgatgtagtattgttgtgggacaatcagagatgggagagaccgaacagagttcaggaaagcctttattaaggtgatcacctggctcagtaggactagagtccaggaaagtgagccccagacaaagaaagcagccaccttttaagcagtcagcagccgggagctacgtgatgcaggaagcatacttacagaagtgagaacagaggcagttgatcagtcttttacatttatctatactatgtgttccacatccttgggaaaccatgtttctgtaacatatgcttaccaaccttgtaactgcagctgcgctagggaggtgaagcagaaactcactgagcctcaaggaatgtgaaactggtgagtacagataaggctctctgagcacagaaggaaaaacaggcagttagtattcttctctaacttagactttgttggggggctacactacacttagcttttgaaggaaaaaataaaaatttcttggttgtctttgattacacttgtaaaattcatgattccttctttagtattacttgaaataaaaactgagcaaatacagcaaaatacattttaaagttaatctcatgtcaaaataggtacagaagttctaataaaataataaatggaatccagaaatgtattaaaaataatatgttgtatatatatgtattgtattagaatgtcaatgcaattaaagatggaaaatgtgttgtttaattacatgaaaagtttaaaaagtgaccattctctatgattctgaaaacaggaattgtctcaacagatgtgttttcgcatctacatttacctacacatattttatatgacatctatctattctttatccattcatagaatgtataaaaaaagaatggatttaaaatgaatagcatctgataaaagaagcacttaaatgtattatgaaagttactttattacatagtgtccagatacttatatgttccctcagaaattataaaataagattgtatcaactcttccaggtaatttaagaaaatattttaaaaatatgtggataaggttattagctgaaaataagagagaatacattcatttgcacagataaagagaacactttttaaatacaaaaagtatcacgaaaaatgcagataatgtacattatctaaaaaatactaaatctaaaaaacaactcagtgctataagatttatgcagcatagagaaattatatataaatatcaactgtttatatttacttttttgagagagggtctcactccattacccaggctggagtgcagtggcttgatcatggctcactgcagcgtcaactccctgggctcaggtgattctcccatcccagcctcttaattagctgacactacaggtgtatgataccacacccagctagttttatgtacttttttgtagaaatgaggtttcgccgtgtttcccaggctgaactcgaactcctgagctcaagcaacccgcctgcctaggcttcccaaagtgctgaaactacaggcattagcaaccatgccctgcctgaatatggatattttaaataacttcagtgtgaaatactaaacacagttcaaaatgtattttacttatatgcaatgagttgaacaaacattcaagagctaaatgatgagtaaatataaggcccaacaaccaggggcatgataatgcaaacagctaatgtgtggagcactcttgctttgccagcctgtgtttcaaagcattttaaatatttttgctcattaaatcctcatcagcaaaaactctgtaagtttaattattccccatgtcacagacaagtgactgaaggaaaaaaaattcagggacttgtccaaggccacccatatagggagtggttgagctaaggtgtgctctgacttactcctctctgcttctcttgaatagaaagtgctataattcattgattaaaaaaactactcttggccggacatggtggcacatgcctataatcctagcactttgggaggctgaggcaggtggatcacaaggtcaagagatcaagatcatcctggccaacatggtgaaaccctgtctctactaaaaatacaaaaattagctgggtgtggtggcacatgcctgtagtctcagctacttgggaggctgaggcagaagaattgcttgaacccgggaggtggaggttgcagtgagccaagatcgtgccactgcactccagctgcgtgatggagcaagactctgtcaaaaacaaaaacaaaaaaactactctttgagcacctgccatggaccaagcactgtgattggcactaggaacatagtggtaaactagacacagctcccaggagcaaagacataaagaagtaaacaacaaacctcaagatcatttcagagaatgtgaagtgccaggacatgctgctgctataaagaatgtgtgtgcacagggctaatgggggtgagctctagttaaaatgaggtgggtagaacaaagcttcccagggagagccagagctgagccaggcctggtggctcctatcagtgtgagaatgtggttatattctgtctcagtttttttgtatgcagcccttaaaatctttggaatgtctgatatgagaaatgtctttcgcatgctaatgagattactgctttccaggggcttctggacagcctcagaatggggattggttgccagaaaaaccaatcctgtaatacagagttaaaactttcagcttaaccccttatctcctgggatgttagaggagctatcttgcctttgtaaaagtaaaaatagtaccttataccatttaaatgaatagataaattgttcaaaaaaggggcatatcattaaaaagctcctctgccccagcctgactacttaaagtacccattaggggaagtttttttggtatccttctgaaattgctttctgtctttccatgcataccatccttaggaaagggcacacttttttgagacggagtcttgctctgtctcccaggctggagtgcagtggcccgatctcggctgactacaacctccacctcccgagttccagtgattctcccacctcagcctcccaagtagttgggattataggcacccaccaccacaccaagctaattttttgtatttttagtagagatggggtttcaccatgtcagccaggctggtcttgaactcctgacctcaagtgatctgcccatctctcccaaagtgctgggattataggcatgagccaccatgctcggcctgggcacactcttaaaccaatctgtaatctctgttcctgaggttttagtaacctgatatttctctcctgttggagacaaccctgaaaatgagttttcacctcagagaacagaccaacaaaaggtcaggtgagcttaaaaaagctggcggggggatttgggtccagaaagggcaggctggccatacattcaggggcatcagtgtgactgtctttgcaattaggagccaggccccacagagcttcccactgcatgtgtgtttgacctatgctgggccctgatgttgattcgtttccttcactgagcaggtggctcatagttgggctattatacccaggagaatgttccaggccagcccctagttaacttaaaataatcaaaaagtttagaatcaaatttgaaacaaatttattcagggtcgcatattgaggatcacctccataaggatagatttaaattgccctgaatatatattctgattagcagccattacaagcaggtatttctatgaaaatgagaaggcagttctaaagtggtttaccaaaaatttacattaaaatacataagctattgattagctatttttctttattttacaaatttcagaaaaaagaaataatgggtgagacagccagtcagaaacacaatgtaaggtcctctgaacaggctacaccatggtggagccattgcaacctctgtgacccacatgtacaggcctcctggagtcacaaagcctgtagcaacaggagaaccactaaagaagaagaaacagctagttcctgccttaactgattaaccaaccttgcaacattccaccattgtgatatgttgctgcccttccctaactaatcaatcgactttgtgatatcgtgccttgtaacctccccctacctcgtgactatgcaccttgtgacattcttcccctgcctgaaaaaactgccctaactgtaactttccactacctaccccaaacctataaaaccacttccactgacaccaccctttgctgactccctttttggactcagctcattcgcacctgagtgaataaacagccttgttgctcacagtaagcctgctaaggtggtctcttatacagatgcacataacacataacatctttttttttttttttttttttgagatggagtcttactctgtcaccaggctggagtgcaatggcactttttcagctcactgcaacctctgccttccgggttcatgccattctcctgcctcagcctcctgagtagctgggactacaggcacctgccaccacacctggctaatttttgtatttttagtagagatggggtttcaccctgttggccaggatggtctcgatctcttgacctcatgatccacccggctcggcctcccaaagtgctgggattacaggcatgaaccactgtgcccagcaacacataatagctttaaacaattgaccctgggcacaggtgtggagtgagactgaagtcctagactctcatctctctgggcttgatgaattgtgcagaacgcacaaagctgagactgccatgagctatttttcttctctcacccccttgcttaggtcacatgaactataaagaggaaacaaattcaaattagagacttgtcaacccacaaaaataatgcctgaagatgccttccaggaatctggctcctacctcctttccccaccctgccatcaaccatcaactccccttacacacacacaccctggatcacaagaaagacaaaaccatttcaccagccactgagagaggagccacagaaggacccagaacccctgcatggccaccttggacaagcctagaatatactgacagccattgttagcatccaggagctatttattcccatcttcgcactacagtaaagaattttgttttttgagacagagtctcactctgcccggactggtgttcagtggcttgatctcagttcattgcaacctctgcctccaagattcaagagattctcctccctcagccccccttgtagctgggattacaggcacctgccaccatgcctaatttttgtattttttttttttttagtagagacaggatatcgtcatgttggccaggctgatctcgaactcctgacctcaggtgatctgccaaccttggcctcccaaagtgctgggattacaggtgtgagccgctcgaaagcagcctggccaacattgcgaaaccccatctctactaaaaatacaaaaattagccaggtatggtggtgcgtgcctgtaatcccagctactaggggtttgaggcaggaggatcacttgaactcgagaggtggaggttgcagtgacccgatatcctgccattgcactccagcctgggcaacagagcgagactctgtctcaaaaacgacaaaaacaacaacaacaaaactttaaacagtcacaaggaagattgtctagactgtctagattccctagactagctggaagctggtgcttgcaacatcccgtatcccccaggagctcactgctgcagtctcaggtacacacctgcccatgtgccattcaaatgaaacaactgttatcaaggaaccagagttcctgcaatggtcgtgcttcagtctggggtgcattagtgaccagctagcagggtcttgcctgtgtaaaccaaaagttatctgagacaggtctcaatgtagaaagcttattttcccaaagttaagaatgagcccatgacacagcctcaggaggtcctggtgacatgtacccaaggtggtcgggatatagcttgcttttatgcattttaagaagacaaattagctgggcttggtggcatatgcctgtagtcccagctgctcagaggctgagacaggaaaattgcttgaacccgggaggtggaggctgcagtgagccaagatcacaccactgcactccagcctgggtgacagagtgagactgtttcaaaaaaaaaaagaagacataagacatcaatcaatatgtataagatgtacattggtttcgcctgttaaggggggtcagcttgagattggggctgccaggtcataagtaaataaaagacaaaaggataaattcttttgagtccttgatcagccttccactgaatacaaaatttagtctggctcagtgaatctgcatttctaaattaacaataggggccaggcacagtggctcacatctgtaatcccagcactttgggaggctgaggtgggtggatcacttgaggtcaggagttcaagaccagcctggccaacatggtgaaaccctgtctcctctaaaaacacaaaaattaattgggcatggtggcgggcacctgtaatcccagctacttgggggctgagacaggagaatcacttgaacctgagaggtggaggttgcagtgaggtgagatcatgccactgcactccagcctggatgatagagcgagactctgtctcaaaaatgtaaaataaattagcaatagggcaggggaggcaatcagatattcatatgtctcaggcaagtctcagagggatgactttgagttctgtctgtcatttgttcacacaagaaatgtctgtgggcaaattgtgaagaaggtatgtagcttttatttatctttgtagctatcttatttagaaataaaatggaaggcagatttgcccgacatagttctcagattgacttttccagtggcttagtaattttcacgtcacgagatttattttcctttcacagcagggaccccttttattatcaagtgtatctgtttaaactagacagactaaaacaagatgtctattcataagttacaaatggaggttaatagaaaactcataaacacaaatataactatcctacatctttcaaaatagcccatcctaattcttccatttcttgttcactataattcatgtagatttttttcataattttatagtggatctcaatatcagaggtgttcaaaccagagcaactccatctcaaaaagtagctgggtaaaatgaggctgagacctactgggctgcatccccaggttaggcattcatagttacaggatgagataggagatcagcacaagatacactgcacttagcaatatgtcacaatcttccctgtgagcagggcacaggcagaatagaggagtcacatatttaggtcatggatgcagagatttgtcacaaaggccctgtgggtggggtcaagaaaggagcttcccatcccctaggtgttgggcccagcaatatatcacaatacccaatacacaggaaaaaggtagagtcatatcacctaggtgctcggtccagtgatatttcacaactgttctttgtgtggcagattctagtcaaaaaaggagagtcacaacacttaagtgatgaaaaatatgtcataacacctttctgaacagagaccatgcaggagactcatactacctaggtgttggacccagccatatttcacaatacacaatgtgtgcagagaccaggcacaaaaaaaaacaaaaacaaaaataagtcacgccagacgtggtggctcacgcctgtaatcccagcactttgggaggctgaggcaggcagatcatgaggtcaggagattgagaccatcctggccaacatggtgaaaccccgtctctactaaaaatacaaaaattaggccaggcgcggtggctcacgcctgtaatccctacactttgggaggccgaggtgggtggatcaccttaggtcaggagttcgagaccagcatgaccaacatggtgaaaccccatctctagtaaaaatacaaaattagccaggtgtggtggcacatgcctgtaatcccagttacttgggaggctgaggcaggagaattgcttgaacccaggaggcagagattgcagtgaggcaagatcatgccaatacactctagcctggtgacagagtgagactctgtctcaaaattaaaaataaaaaaagtcccatgttggggccaggtgcggtggctcacccctgtaatcccagcacttgggaggttgaggcaggaggatcacctgaggtcaggagttcgagaccaccctggccaacatggtgaaactccatctctactaaaaatacaaaaattagccaggcatggttgtgtgtgcctgtaatcccagctactcaggaggctgaggcaggagaatcactttaatccaggaggcggaggtttcagtgagcagagacatgccattgcactctagcctgggcaacacagtgagactccgtctaaaaaaaaaaaaaggtcacattttgtgcagagcccaaacagtagaagagagtcatatcacctaagttctgggtccagaaatgtcacagtaccctctgagggaagacccctggcagaaaagtcacatcatctaggtgagaggctcagagatatgtcacaatgccccctgtgggtagggctcaggaagaagagaaagatcacataacctaagagctgggccgagctacatatcacaaccacccagtgggcagggccaaagcatgagaaaagagtcacatcacataggtgctaaaccaagtgatacatcacaatccccactgtggacaggtcccgggaagaagaggagtcacatcatctaggtaatgggcccagagatatgtaacaagaacccctttgaacaggaaccaggcagaagtattacgttccctgtgtgctgatcccggggataagtcactctcttttatgggagcgtggcaatagcagcaaaaaagagtcacataatctaggtgttgggcccagagatatgtcacaatctctcctataggaaaaacctaagtaaaagagtcacatcacatagatgatggattcacagatatgtcactatgcctgctgtgggcagagttcaggaagaaggctcatatcacctaggttctgagcctgacaatatgtcacaatgcatgatgaggaaagggccaaggcaaaaatgtaacatcaccttggtgtttggcccaacagtatgtcacaatctacactgtgagcagaacctaggtagaagggaagaggcatatcagctaggtgccaggcccagtgataggtaacaatcctttctgtgagcagggacctggtagaaagagagagtcacgttacccgggtaatgggtacacagataggtcataatgcttcctgtaggcaggacccagcaaggagagttacatcacctggatgttggacatagcaatatgtcacaatggcccatgaaggcagggcacaggcaggagagtcacataatcaagttgtagggcccagcaatatgtcacaatgccctctatgggcaataccgaggcaaaaatatggatcacacaacctaggtgttggattcagcaatgtgtcacaatccaatttgtggcctgcaaaccaggcaggtgagtcaaatcactcgggtgctgggcagaggtgtatgtcacaattatagttgcagaacaatgtagagataaaattaacaatcccacacatgtcccatttctaggtattagagtcaacacttttttttttttttgagatggggtcttgctctgtcaccgaggctggagtacaagtggcgcgatcttggctcactgcaacctccacctcctgggtttaagtgattctcctgcctcagtctcctgaatagctgggactacaggcacgcaccaccacgcctggctaatttttgtatttttagtagagatggggtttcaccatgttggccaggctggtctcgaactcctgaccttgtgatccacctgccttggcctcccaaagtgttgtgattacaggtgtgagccaccgcgcctggtgagtcaacaccttttgttatgttcagtctgagtacacgagtcacagtctcaacggttaactggatacactgatgagagcctcaattgttgctggggactgtgtccccttagtggggtcaaagctgcacacgtatgctgaatcttggtctgagagtcaccaacccacatttcaacaaaatccgtgtatgagagtcaattttccaacttttggctatgtccaggtgtgatattcagtacttcaatagctgtgttcatgtggaaagatgacaatctttatcgttggctgggtgtgcataggagtgtcacaatgtcgcttgtgcactgggccctgttacagaactctctgtactaactgagagctttatacaatatgcatgatagtcacaagttgttctgagacctttgttgtagtatggactcaattgtacctgtggacctaagcccatgtattagaatcaacatctctccaattggctgggtccagagagaagagtcctcagctgcctatgagctgggtttagaaatgagacactaacttaactgtggtcacataatcacatgtgacagtcacaatttttactgtggactgcattcacatgtgaaattaaggatctcttcagtgggctctgtccatgtgtgagggctacaagttatgaaagtcaacattgtttggatgttgggtgtaactacacaagtcacaatctcaatgtgcatggatccatgcataagagcctcaatctctctgcaaactccctctcactaaattatatcctcacaggcgtgctgaatcttggtctgtgagtcaccaacccccctgtggaccaggttcacatatgagagtcaattttgcaactttccatgtggtaggttgtgcatgagagaaacacagtctcacctgtgtgcctggttctgtgatgacgctctttgtaccatgcaaagacattgcacaatatatgaaagaatgaccatcctttatgacgttcttactacagaagactcaggagtttattcatttctgtaagtctagctacaagtggcagtatctctcctattggctgttttgtggcgtaagtgtcatcatcacaaccatgagctgtgctaaagtgtatgtcacaatccaacctgtgagtagaaagcaaacaggagagtatcgtcacgtgggtgctgggttaagaatatgtcacaatttttccaaggcagggaccaggcaggagagtcaaatcacctggttgcctggccagggttatgtcacaattccctcctgaaagcaagacacagacagcaaagtcacaccactctggtgagctgggcctagctatgtcagaattctctctgtaggcaaagtctgggcacaagggacacaccaccttgttgatgaacccagagatatgtcacaatcttctgtgtggacatagtgcagatagaagaggagtcacatctccaaagtaatggatgcacagatatgtcacaagacctcctatgggcagaacccaggcaagagtctttcacccatttggtttgacccagggatatgtcataatacccaaaatacaaggaacccaggtgaaaaaggagagtgatatcacctagatgctaggtccagtgatatctcacaatcccccctttttatagggttcaggtagaaaaggagagttacatcacttaggtgataaacaaaaagatatgtcctaattcccctattaacagggcccatgcaagagagtcacatcacctgggtgttgaacccaatcatatttcaatatacacagttttcttttcttttcttttccttttttttttgagatggagtttttgctcttgttgcccaggctggagtgcaatggcatgatcttggctcactgcaacctccgcctccagggttcaagcgattctcctgcctcagcctcctgagtagctggaattacaggcacgtgccaccaagcctggctaattttgtatttttaatagagatggggtttctccatgttggtcaggctggtctcgaactcctgacctcaggtgatctgcccgcctcggcctcccaaaatgctgggattacaggcatgagccactgcgcctggccaatatacacaattttcaacatacacaatataaaatttgtaaatttaaatatggctgggtccaacgtctaggtgatgtgatccccctgcatgggccctgctaagggaattagggcatatcattttgtttgtcacctaagtgatgtgactcttcctttctacctgaaccctgtagcaggagaggagagtcacatcactaaggtgctggccccagtgataccttacaattcctccattggccgaacccaagcagtagaagagagtcacatcaccttgttgctaggtcaaaaaatatagcacaatattccctgaagaaaagaaaaaatgagcccatgaagcagagtcacatcatctaagagagggctccagagatatgtgaaaatgccccatgtgggtaaggttcatgaagaagagaggagtcacataacctaggaattgggactagttaaatgtcacaatcaccccagtggggggacccaggtatgagatgaaagtcacattatgaagatgctgagtcaagtgacatgtcacaatccccactatggacaggtctcagagacaaaaggagaggcacagcatctagtttatggacccagggacatgtcacaatgtcccctgtggatagggaccaggcagaaaaattacatcatctgtgtgctgaacccagtgataagtcactctcctttctgtggtcagggcccaggcaagagagaagagaaacatcacataggtgcttggcccagataggttacaatgtctcctagagaaaagctcttgtaaaagtagagagtaacatcaaatagatgataggtccaggaatatggcaaaattccccctgtaggcaaggtctaggaaggagattcacatcacctgagtgttagacccagcaatatgttacaatagcccatgtgggtagggcacagaaaggacaaacacattaccagggtgcagggaccagtgacatgtcacaatgccctctgtggcagcaccaagaaaaaagtacagatccacattatctacatgctgggttcaacgatgtgtcacaatcccacaatcccatctgtgtgctgggcccaggcaggagagtcaaatcactctgtttctgagaagcatgtgtcacaatcacacctgcagaaaggcccaggtatgagaagaacaattcctcacatgtacctgctctagttatgaaagtcaacactgtttggatgttgggtgtaaccacacaagtcacaatctcaatgtgcatggatccatgcataagagcctcaatctctctgcaaactctctctcctcaataaattacagcctcacaggtgtgcggaatcttggtctgtgagtcaccaacccccgttgtggaacaggtccacatatgagagtcaattttgcaactttccactgcctccgggtgtgagattcagaacttcagaatcttcagaacttcagaagtgggttgtgtttatgtaaaagggttgtgtttatgtaatatttactgttggctggttgtgcatacgggtgtcagaatgtcacctgtgtgctgggccatgtaaggttactcaatctgaggactttacacaatatgcatgagagtcacaatccactctgagacctttgtggtaccatggacccatgattatacctgtggctctaagctaaggaatgagaggcaacttctgtccaattggttgatccatataggagagtcctcaactgcctatgaactaggtttagaaattagtcatcatttcttttctggctggatgtttgcatatcacagtcacaatttcaaccgtggactgcatgtgcatgtgagattcagaacctcaccagggggctctgtccatattgaggtaacaatcataatggttggcagggtgttcatttaagaaacatgatctcagctatgttttcggcctgtcatgatgctctgtgccacctgagaactttttacaatatttaaaagtggtgggccaggtgcagtggctcatgcctgtaatcctagcactttgggaggcccaggcaggcagatcatgagttcaggagtttgagaccagcctggccaacatggcgaaactctgtctctactaaaaatacaaaaaattagccaggtgtggtggcaggcacctgtgatcctggctactcaggaggctgaggcaggagaatcacttgaaccaggaggtggaggttgcagcgagctgaggtgacgccactgcatgctagcctgggcgacagtgtgagactccatcttaaaaaaaaaaaaaaaagaaagaaaagaaaaaagaaaaaaaaaagagtggtgactctctatgacctttgcaaatagaggagactcgggattatgtttgtttttctaaggctagctaagagagggtgtatctcttttattatctggttcgaggtatgagaattattacagcaactgtaagtggggacaagacatatgtcacaattacatctctgggtagggagggggcaagagagtcacacctggggctagttcagagatatgtcacaatattttttaagggcaaggaccaagcaggagagtcatatcacctaggtgcttggcgagggatgtattaaaatctctgcctgtaagatgggcgcaggcagcaagtcacatcacctgggtgctgggcctagtgatatgttacaatgttttctttgggcatgatgcatatagatgagaagagtcacatttcataggtgacaaatgccaaaatatgtcacaagaccccctgtgggcagcgcccagataggagcctcccatttcctaatgtcaaacccagtgatatgtaacaatatgcaaaatatgtaagatccaggcaaaagatgaaagttacatcatctaggtgctaggtccagtgatacatgataatcctttttttggcaggttgcaggctaaagaagagtcacaacactcaggtgatgaatgaaaagataggtcatctactcttgtggtcaaggcttatgtagaagactcacatcactgggctgacagacccggctatatgtcacaatacaaaatctatgcagaacccagacaagagaaaagaatcccgtcatgtaggtgctgggcccagtgatacatcacaatccctttttggtcaaagtccaagtagtagaggaaaagtcgcatcacctaaatgctgcatccagcaacatatcacaataccccctgagaggagagtccaggcagaaaagtcacatcaccaaggttaaaggcccagagatatttcataatgttatctgtttgtagggctccagaaaaatataggaatcagataacataggagctgggcacacctatatagcacaatcaccacagtgggtagagcctaggcatgagagaagagtcacatgacataggtcctcagccaagtgatatgttacatttcccactgtggacagattcaggaaaaaaaaaaaaaggagaggtctatcattaggtaatcagattcagaaaaaaaaaagagagatctatcgtctaggtaatcggcccagagatatgtcacaatgaccacttgggcaaggaccaagcaaaagaatcacatcccctgtgtgctgaacccagcaataagtcactcttccttctgttagcatgacccaggcccaaagatatattacaatctaacctatgggcaaagcccagataaaagaggagagtcacataaaatagctgatgggctcagagatgtgtcaaaatattttcagtaagtggggtgggtccaggcagaaaactcacatcatctaggtgtagggcccagcaatacgtcacaatgtcttacatgggcaggaccaagaaaaaaaaagagtaatatccatttggtgctaggttcagcaatattccacagtctgtttttcaggaaaaactaagaaataaaagaagagtcacatcagctatatgctgtgaaaggtcaaaatccttcctgtgagcagacagcaggtaacagaagagtcacatcacctgtgtgattgatgcaacgtcattccaaaatgccccctgtaggccaggtgcaggcataaaagttacatcacctcattgttggacccagcaatatctcacaatggcccaagtgggcaaaccgcagacagaagaatcacataatgtcagtgcagagtcgggcaatatgtcacagtatcctctgcaggcaaaaccaagaaaaagattagagtaacatcagctaggtactgggcatagcaatatgctacaatttccctgtaagcaaagaccaggcagaagaagagaatcacatcacctggatgccgggcccagtcatatttcaacaatctttcctgtaataaagacccaggcaggagaaacacatcatctggttgctgaccacagcaatatgctacaatttttcctgtaggcagcgtgcaggcagaagaggagagtcacatctcctaggtgatgagtgcagaaatatgtcacaatgccccctataggaagtgcccaggtaagagattcccatcccttaggtgttgagcctagcactatgtcacaatacccaaatatgtgtggcctaagaaaaagaggagacttacatcacctagataggccagtgatgtttcacaatttctctgagcagagaccaggcaggagaagagagtaacatcatcatggtgataggcattcagttatgtcacaaagatgcctcctggcagggcccaggaagataatgttacatcacctgggtgttggacccagcaatatgtaacaatgtctaatgtgacatattttgccaaaatatggcacaaaatacagggcacaggtggcagagtcacataacaggggtgcaggatccagcaatatctgacaatacccaaaatttgtggggtcccaaaaatagaggagagtcacatcacctaggggctggctccagtgatatatcacaatctcacctttgggctatgaccaggtagaaaagtcaagtcactcaggttctgattagaagtgtatgtcacaatcacatctgcagaaaggtccagtgatgaattaacagtcctgcacaggtcccagttccaggtatgagagtccccacattctctatgttgggtctaagtatgatagtgacaatctcaccaataaagtggatccatgtatgagattctacatacctcctgtgaactgtattcgctgtggccttaagcccaggtatgggagtcaacatgtccccagttggctgggggacatgttgactcccatacctgggcttagatagatagaatactcacgggttcagatagaagaattctcacctgcctatgaactggatttagaaatgagtcgtcatgccaggctccgtggctcatgcctgtaatcccagcactttgggaggctgatgcaggtgggtcacctgaggtcaggagcttgagaccagcctggccaacatgatgaaaccccatctctactaaaaatacaaaaaattagccgggcatggtggtgggcgcctgaaatcccagctacttcggaggctgaggcaggagaatcgccttaacccaggagatggaggttgcagtgagccaagataatgccattgcactccagcctgggcaacaagaatgaaactgcatcccaaaaaaaagaaagaaaaaagtcataattccaactctggctggatgttcatgtatgacagtcacaatttcaactgtggaccgtgttcgtgtgtgagattcgagacctcaccagtgggctctggccacgtgtgagggtgacaattttaatagttgctggggtatgcatatgagaaacacaatctcacctgtgttctgaaccctggaatggcaatctctgtacaattagagatttatatagtatgcaagaaagtggatattctctataacctttgtaaaagaaggagagccagcattttactcattattttaagcctagcaataagaaacagcatctctcctactgactggtttgaggtatgaaagccaccgcactcagcatggtaaatcatttctaaatccagttcatagccggtgagaattcttctatctgaacccgtgaggtatgaggtatgagagtcatcatcacacctgtgagctgggccaaattattttaaaatctcacctgtgaatatggagagacaagagtcacaacacctgggtttttggccaggaatacatctcaatcttttcttacagcagggaccacacaggagtgtcacatcaactgaatactcagccaggaatatgttacgactttctcctgaaagcaggacactgacagtagagtcgtatcacctgggtgctgagcccagcaataggtaacaatgctctctgtggtcaaggcccaggtaggagagacacctggtacctgggcctagtgacaattcacaatttttcctgtgggcagagtgcaggcaaaaatggagagtcacatctcctaggtgattgatgaagagatatgtcacaaggccctctctagacagggcccaggcaggagcctctgattttataggtgttcagcctagtaacatgtcctaacatgtgaaatattcagggcacgggcaaaagagaagagtcacataacctgagtgcagggcttagcagtatgtcataatccaccctgtgggcagcaccaaggctggaagagaaagtcatatcttcaaggtgcagagtcaagcgatatgtcacaatcttatctgtggactgggtcaaggcaggaaactcaaatcactaaggtgcttagcagatgcacacaatcacacctgcaggaaagtccaggaatgagattagaaattccatacatgtccaggttctaggtatgagagtcaacacctcctggatgttggatctatttatctattttgtttttgcttttgtttttttgagatgaagtctcactcttgtcccccaggctgggatgcaatggtgtgatctcggctcactgcaacctctgcctcccaggttcaagcgattctcctgtgtcagcctcccgagtagctgggattacaggtgcctgccaccacgcgcggctaatttttgtatttttagtagagatgggggtttcaccatgttggccaggatggtcttgaactcctgacctccggtgatccgcctgcgttggcctttcaaagtgctgggattacaggcgtgagccactgcgcccagccttggatgttggatctaagtgtgtgagtcacagtctcaatggttgacagaatttttgcaagacagccacagtttattctgcagacttgtcctttcagtgcagttacagcctcacatgtgtgctgaatcttggtctgagagtcactagcccacctgtggagcagatccacatatgagagtcaattctctaacttttgacagcctccatgtgtgatatttagaacctcaacagtgggatgtatttttgtggagaatgacaatctttactgttgcctgggtgtacatttgagaaacactatctcacctgtgtgctgtgttctcttatgacactctctgtgtcacctgaaggctttatacaatatgcaagaatggtgatcctctgtgaccttcatacaggaaggagatccagagtcttccctgtggttctacgtccagatatgacagtcaacatctctccaattggttgagtccagataggagagtcctcaccttcctacaagctgggtttagaaatgagtcaccatcccaactgtggccagatgttcacttatgacagtgaaaattccaactgtgaacggcattcacgtgtgattcaggacctcaccagtgggctctgtccatgtgtgaggataacaattctgaaggttagtggggtctgcataggacaaacataatctcacctgtgtgctgggtcttgttatgacattctctgtaacatactaggtctttatagatgtgagaaattggtaattctctatgacttttgtacagaaaaaagactttgttattttcctaagcctacctaggggcaacattatctctcctattgccaccttcgaggtatgacagtcatcattacatctttgttcttggccacaatatatgtgggtaaagagcaagcataagagtgacattaactgtgtgctggaccaggggtatgtcacaatcttccctgagggcatggaccaggaaggagagtcacatcacggggcactcagccaaggatgttacaatttcctcctaaaagcaggacacaggcagaagagtaagatcacctggatgctgggccaggatttagtcacaaggctcactgtgggtgaggcccagagaggacagacacaatacctggttgctgggcctaatgattgtcacaatcttccgagtgggcagaatgcagaagtagacagtttcatctcctgggtgatggatacagaaatatgtcacaaggccccctgtaggaagggctcagtcagaaaccttccaacccctaggtatttgttctaatgatatgtcacaacatccaaaatatgaagatctcaggcaaatgaggagagtcatatcgcctaggtgctggacccagtgatctgtcacaatcttttcttttggcaggcctcaagcagaagggaagagtcacaccacccaggtaataaatacaaagatgtgtttaatatatctgtgggagggcccatcacctcagtgttggacacagagatgtgttgcaatacacaacgtatacagggcccaggcagcagaggagagtcacatcacctaggttctcagttcagcaatatttcacaataccccctgaggagaaggcctaggcaaaaatgtcatattatctaggtaaaaggctagggatatgtcacaatgccttctgtgggtagggctcataaacaagaggaaagacataacctagatatggggctcagctttatgttccaatcaccccactgaaaagggcccaagaatgaaagaagagtcatatcacaattcccactgtagacaaaccccagaagaggagagtcacatcatgtagaaaaaagaaggcatttacctgggctttgcccataggagaaattgcaatgggtcaagagatatgttacaatgcttcctgtggtcagggttcaggcagaaaactcacataatcttggtgctggacccagcagtatgtttcagtgttttctaagggcacagccagagcaaagaagtaacatcaccttagggttagatgccacaatctcatttgtgggcagaaagtaccccctgtgagtagagaaaagggaggaaaaaaaggcacattccctcagtgattggtgaagatatatattacaatgacttctgtagacagagtccagaatgaagttacatcacctgagtgttggactcagccatgtgtcacaataacccatgtggaaaggacacaagtaagagagtcacataacctaggcctaacaatatgttacagtacacctgtgggcagcatcaagaagaggagactcacatcacctgggtgcatggcccagtgatatatcacaatgccccctgtgggttgtatcaaggcaaaatagagtgacattaccaagggtctgggtcccatgatatgtcactgtgagctgggcccaggtgagagagtcaaataactcagatgctgggcagagtcacatgtcacaatcagacctgtaagaaggtactgtggtgacattaaaaatgacattgtcagccaggtgcagtggctcacacttgtaatcccagcactttgggaggctgaggcaggtggatcacctgaggttaggagttcgagaccatcctggccaacacggcaaaaccccgtctctatcaaaaatacaaaaattagctggatgtggtggtgtgtgcctgcagtcccagctactagggaggctgaagcaggtgaatcacttgaacctgggaggtggaagttgcactgagccaagatcgtgccactgcactccaggttgggtggcagagcaagactccgtctcaaaaaaaaaaaaaaaaaaaaaaagaaagggctaggcacggtgtttcatgcctgtaatcccagcatttgagaggccgaggcgggtggatcatgaaatcaggagttcaagaccagcctgcccaagatggtgaaacctcatctctactaaaaatccataaaaatttgcctggcgtggtggcatgcacctataattccagctacttgggaggctgaggcagagaatcacttgaacccaggaggtggagtttgcagtgagccgagattgtgccaccgcactccagactgggcaacagagcaagactccatctcaaaagaaaaaaatatgacattgtcttgaatcaaggaatgagagtcaacacctcctacatgttgggtttaagtacaagaaatcacaatctcagtggtggactggatttgccaatgagcctcaatttctcttgcaaactctgtgccttagtgaagttacagccacaaaggtgtgctgaatcttggttaaagagttaccaacctggccaggtgcgatggcttacgcctgtaattgcagcactttgggaggccaaggcgggcagatcacgaggtcaggagattgagaccatcctgactaacacggtgaaaccctgcctctattaaaaatacaaaaaattagctgggcgtggtagcaggcacctgtagtcccagctacttgggaggctgaggcaggagaatggcatgaacccgggaggcggagcttgcagtgagccgagattgggccactgcactccagcctgggcgacagagcaagactctgtctcaaaaaaaaaagtcatcaacccaactgtggacagtatccatgagtgagagtccattttccaacattcaattgcctccaaatgtgaaattcagaacctcagaagtgggttgcgttcatttaagtgaatgatttgctgttggctaggtgtgaatatgagtgtcacaatctcacctgtgtgcttgtccctgtcaggacacactctgtaccacttgagggctttatatggtatgcatgagttgcaatctgctctgagacttttgtgctcctatggacccatgatcttatgtggccctaagtctaggtatgagcgtcaacatctctccaattggctgggtccagagaggagagtcctcacctgcctatgagctgggtttagaaatgagtcaccatctcaactgtggccagatgttcacatatgatagtcacaatttcaactatgtactgcatctgcgcgtgagaatcatgaactcatcagtgggttctgtctgtgtgtgagagtggtaattctaaaaattggcagagtgtgcttacaagaaacacaatctaacctgtttgctatgtcctcatcaccctctgtaccatccaagagctttatacaatatatgagagagtagtaattatttataaccttcatatagagaggagacccaggattttacccctttttctaagcctagctgtgagagacagtatctcttcaattggctagtacaaagtcttagagtcatcatcacacctgtgatctgggccaagatatatgttaccaaccaacctgttagcagaaagcatccaggagaatcacatctcctgggtgctggaccaatgatataaaaaatccttccctgagggcagtgaccaggcaggagaatcacatcacctggtttctcaactagtgataggttaccatttcttcctgaaagtaatgcacatggaggagacacacatcacctggtggctggaccctgcaatatgtcacaatctttcctgtgggcaggtagaaaaggagtcacatcttttatgtaatggatgcagataaatgtcacaaaaacccttgcagacagggctgaggcaggagcctcccatctttcaggtgtttggcccagttaaatgtcacaatacccaaaaatgtggttcgcaggcagaagagaagagtcacattgcctaagtgctagttccagtgatatgtctcaatctttccctttggcagggtccagggtgaagagaggattcacacagcctaagtgatgaaggaaaatatatgtcctaatatgcccaggagcagggcctatatgagacagttgcatcagctgtatgttgaacccagtgatatgtcaaaacatacaatttatgcagggcccaggcagaagagagtgtcataacctaggtgtcagtcccagtgatacatcacatacatcacaatgccttactttttgttgttgttttttttgttttgttttggcgaagtctcactctgtcaccacggcaacctccacctcttaggttcagcgtccagggatatgtcccaatccctctttttgtcaaggcccagccataagtagagagtagcatcacctgggtgatgaaagaaaagatatgtcatcatacccctgcaggcaaagcccatgcaggagagtcacatcacctaggtgtggggcccaacgatatattaaaatctcttcttgggtatatcccaagcagtagaggagagtcacatcacctaggttctcagtccagcaatatgtcacaaggccccttgaggggaaggcccaggcaggagagtcacatcacttaggttaggggccaagagatgtgtcacaatgttccctgtaggaagggctcaagaagaagaggagagtaacatgacctaggggcttggtcaagttatgtgtcacaatcatacctgtgagcagggtctaggcatgagaggagagtcacatcaagtaagtactgggccacgtacatgatgtatcacaataacccatatagacaggtcccaggaagatatcacctaggtgctaggtccagaaatgcatcacaatgtctctcatgggcaaacaccaggaaaaaaagggaaggggataacatgaacaatctgatgggccaagagatatgtcacagtgcccactgtgggcagggtccagccaggagacgcacatcaccttggtgttggacccaggaatatgtcataatgccttctgagggcaggcccaaggtgcccagcaacatgttacaatctcttctgcaggcagaacctagaaagaagagttgagtcacaccagctaggtactgggctcagcaatatgtcacattagtttttgtgagaaggaactaggcaggagaagaaagtcacatcacctgggtgatgagcaaagagatatgtgacaatgactcctataggcagaacccaaacaaattagttacatcacctaggttttggacccagcaacatgtcacaatggcccatgttggcagagcacaggcaagagagtcacataacttgtaggggacagcagcgatatgtcacaatgctcactgtggacagtaccaaggcagaaaacagaacttccatcatctgggtgctaggcccagtgatatgtcacaatgtcccatgtgaaagcacagaagcaagagaatacagtcacatcacctagtttctggtccagcgatatgtcacaatttcatctgtgggctaaatccaggcaggagagtaaactatacagaggcatatggcacaatcacccttgcgtatacagaggcatatggcacaatcgtgcttgcaggaaggtccacagatgagatcaacaattctgtacatatcctgcttctgtgggcaccaggaagacaggagaggagactcacattacctgggagcaaggctctgagatatgttacaatgtcctttttgggtagcaccaaagcaggagaatagagttacgtcacctaggtgctgggtccagcagtgtggcacaatcctatctgtaggctgtgctggtgctaaagagtcacattactcaggtgcaaggcagaggtgtatgtcaaaatcacacctgcaggaaggacaggggatgagatgaacaatactgtacatatcccgattctaggtatgagagtcaacacctcctgtatgttggttctaagtacactagtcacagtctctgaaatgaactgaatcagtgcatgagaaactcagtccctcttaccactgtgcctccttagtggaatcacagcctcacaggtgggtcaaattttagtctgaaagtcaccaacttacctttgaactggatccacatatgagagtaaattttccaccttgcaactgcatctgtgtgagattcagaacctcaacagtaggctgtgttcatgtgagaagatgacaacatttactgtcggctgggtgtacatatgagtgtcaaaatctcaactgtactttgggcccagttagaacatgctctgtaccagccaagtgttttataaggtatgcataagagtcacagtcctttgtgactgggagacattcgtgctggtttggactcatgattgtgcctgtggctctatgcccagttataagagttaacttctctgcaatggctcagtccagatataagagttgtcccctgcctataagcttggcttactaaggagtcaccacctctgctgttgcctgatgttcacatacgacagtcacaatttcaactctgcactgcatccacctgtaagatttaagacctcaccagtgggctctgtccatggatgagagtgacaatcttttttatttttatttttatttttatttttatttttgagacagagtcttgctgcgtcacccaggctggagtgcagtggcaagaccttggctcactgcaaactccacctcccaggttcagccaattctcctgcttcagcctccggagtagctgggattacaggtgctcaccaccacgcccaggtaatttttgtattttagtagagacacggtttcaccatgttggccaggctggtcttgaactcgtgacctcaagtgatccacccacctcggcctcccaaagtgatgggattacaggcatgagccaccaccccggccgacggtcttaacaattggcaaagcgtgcatacaaaaaacacaattgcacctgtttgctgggccctgttatgacactatattacccgagggtttatacaatatgtgagagagtgtaattttctctgaccatcctaaagaggagagccaggattttatccattttcctaagcctagctatgagaaacagcatctcttctattggctagtttgaggcatgagagtcaacatcgcacctatgatctaaacaaagatatatgtcacagtctcacgtgtggatagggcatgcacaggagagttacgtcatctgggtgctgggccagggatatgtcacaatcttccctgagaacaggaatcaggcagaagtgttatcacctgggtggttggtcagagatacgttacaatttcctcctgaaagcagggcacactcagtagagtcacatcatttgggttctaggcccagtgatatgtcacaatgctccctgtgagcaaagctcaggcaggagaaacacatcacctgatttctgggccaaaagatatgtcacaatctctcctatgagcaaagccttggtataaaaaaagagtcacatcaaacagttgatgctcccaaagatatgccacaatgttctctgttatcagggttcatacaaacaacccatgtcaccttgttgctgggcccagcaatatgtcacaatgccttttgaggtccaggccaagacaaaacagtaatgtcacattgttgttaagctccacaagatgtcttaatatctctcgcaagcagaacttatgaagagtcacatttgtttggcactgggacaagtgagatgtcaaaattccccatgtgagcagggaccaggtaggaaatgagagtcacatcatctgggtgacgggtgaagagatatgtcatgatgttctagaacctaggcagtagaattacattaccaggtgttggacccagcaatatgtcacaattgcttatgtggtcggggcacaggcatgacagtcatataacctgggtgtaggcccagagatatgtcacaatgccccctatgggcagtgccaaggcaggagaggagactcacatcacctaagtgcagggcccagcgatatgtcacaatgtcctctgcaagcagcaccaatgcataagaatagagtcatatctcagatctgggttcagcaatattcactatcccatctgtgggctggtcccagggaagagagtcagattactcaggtgctggggagaggaaaatgtcacagttaaatctgcaggaaggtccagggatgatactagcaatcccatacatgtcatgattttaggtataggaggttaaccccttctatatgttgtgtctaagaacaggagttataatctcaacggtggactaaaattgtgcctgagcgcctcaactcctcctgtggactttgtctaattagtgaagtcacagcctcataggtgtgctgaatcttgctctgagtgtcatcaactcacctgtggactggatccacatctgagagtcaagtttccgacctttgactgcctatgggtgtgagattcagaacctcaaaagtgagctgtgttcctttttttttttttttttttgagacggagtctcgctctgtagcccaggctggagtgcagtggcacgatctcggctcactgcaacctccgccacccgggttcatgccattctcctgcctcagcctcccgagcagctgggactacaggcgtccaccaccatgcccagctaattttttgtatttttagtagagacggggtttcactgtgttagccaggatggtctcaatctcctgacctcgtgatccacccacctcggcctcccaaagtcctgggattacaggcgtgagccaccgcatccggccaaaagtgagctgtgttcatttgagaaaatgatgatgtatactgttgggagggtgtgcatacaactatcacaatctcctgtgttctgggccttgttaataccctctttaaaataccccaaagctttatacactatgaatgagaatgacaattaactctgagatcatgtttgtaaacacccatgaccatacctgtggccctaagcccagatatgagtgccatctctcctattggctgggtccagacagtagagtcctcatctgcttatgttctgggtttagaaatgtgtcaccattccaactgtagctggaggctcacatatgacagccacaattccaagtgtggactgtgtttgcatgggaaattcaagacctcggcaatgggctctttccatgtgtgacggtgataatcctaatggttggtgaggtgcacatatgagaaacacaatttcatctgtttgccgtgccctgtgatgacactttctgtaacacctgaaggcattatatgataggtaggtgggtggcaatcctttataaccttcatacaaagaggagacccagaatgtcgtccatttttctaagtcgagctatgacagtatttcttctaatagctcatttgacgtatgagagtcatcattgcacttgtaagctgactacagtatatgtcacaattttacctgtaggtagggagctagcaggagagtcacatcacctggatttcagccaaggtatctcacaatcttccctgagggagggagccaagcaggagtgtcacatcacctgggtgctcagccagggatatgttacaattctctcctgaaagcacagcacaggcaacagactcacatcacctgggtgctgagctcagcactatgttacaatgctccctggggacaagacagaggcagaagagccacatcacctggtgtctgcttccagggatatgtcacaatctttcctgtgcaggccagggtaccggcaaatatgaaatgtcacacattctaggtcatggatgcagatatatgtcacaaggtccctgtgggcagagcccaggcaggagcatgcaatctcataggttttggacctagtaacgttttacaatatccaaaatatgcgaagcccaggcaaaacaagagagtcacatcacctaggtgctgggttcagtgatttgccacaattcccccttttggcagggtctagtcaaaagaggagaattatatcacctgggtgatgaatgaaaagatatgttataacatctctgtaagcagggcccatgcaggagattcacatcaccaaggtgttagaaacaatcacatgtcacaatacgcaatgtacaggaggaaccaggcaggagaggagagtcacatcccctaggtgttggacccagcaatatattacaatcccttcttgggaaaagcccaggaagtagaggaaagtcacattacctgggtactaggcccagtgatatgtctcaatgtcctctgtgaaaagcactaaggcaagagaagactcacatcacctaaatgctgggtccagcaatgtggcacaatcccatctgtacactgggcccaggcagaagagtcaaatcactcaggtgctgggcagaggtgtatgtcacaatcacatctgcatgaaggtcaaggtatgagattaacaatttaacacattttctagatctaggtatgacatataacacctcctggatgttgggtctaagaacatgagtcacaatctcaatgatggtctggatctgtgtgagaacctcaatccctcctgcaaactgtgtccccttagtggagtcacagactcacaggtgtgctggatcctggtctgagagacacctcccttatgaaagatagttacacatgtgatttgatttttcaagtatgtctgcctctgggtgagattcagaatctcaacagtgagctgtgtttatgtggaaggatgacagtctttactcttggcaggctatgcatatgagtgtcacaacctcccctgtgtgctgagttctgttaggacattctttgtacctcttgacaactttacacagtatgtgagagagtgttaattctttatgatcttcatacaaagaggagacccaagacattactcattttcctaatcctggctatgagagacagtatgtctgctattggttactttgaggtatgagagtcatcattgcacctgtaagctgggccaagatatgcatcacaatcccaccagtgaagagggactgagcagtagagtcacatcacctgggtttgggggcagtgatatgtcacaaacttctctgagggcagagaccaggcagcagtgtcacatcatctgggtgctgggcccagtgatatgttaaaatgttctttgtggtcaaggcccaagcaggaaaaacacatcacctgattgctgagaccaatgatttgtcacagccctcccagtggtcagggtgcaggcagaagaggggagttaaatctcctagattacggatgcagagatatgtcacaaggtcccctatgtgctgggcccaggcaggagcgttccatcccatggctgttgaactcagtgaaatgtcactatacccaaaaggtgccaggaacagggaaaataaaagggtcacatcacctaggtgatgaaaaagatatgtcgtaatactgtgggcagttcccatgtcataaagtcacatcaccttggtgttgaatccaggcatatgtcacaatacacaaagcatgcaggccttaagcagaagaggagagtcacatcacctaggcggtgggcccagcaatacatcacaattcctgcttggacaaagcccaatccatagaggagagtcacatcacctatgtactgggctcagcaatatgtcacactgtcctttgtggggagggcccatgcaagagagtcacatcacctaaatgatgggctcaaaaatatgtcaaaatgccctctgtgggtagggctcagaaaaaaaagaaaatcgcataacccaggggctgggtccagctatatgtaataaacaccctagtcggcagggcccatgcatgagagaagagtcacatcacctaggtgctgggttcagtgcaccatactgagaccttgtctctactaaagtaacaatacttttttggcatggcccaggcagaagaggagtgtcacatcacctaggtgattaatagaaaaatattttataatacctctatgggcagggcccatgcaggagagttgtgttatccaggtgttgaagccagtgacatgtctcaatacacaacgtatgtaggtcccaggctggagaggagagtcacctcatctaggttcttgacagagtgatatgacacaatccctttttgggtagagaccaaacagtagagaatagtcacatcacctagatgctgggctcatcaatatgttacaataccccgagaagagggtccaaacaaaagagttatatcatctaattgagggtctcagagatatgacacaatgccccctgtgggtagggctcaggaagaagtgtgcagtcacataaccttgaggctgggcccagctacatgtcaaaatcaccccagtgggcaaggcccaggcataaggacagagtcacttcatgtaagttctgggccaagcaatatgtcacattccccactgtggacaggtcccaggaaaaagagagtcatataatctcagtgatcagccaagatatatgttacagtgacttctgtgagccggaataagagtcatattacctgtgtgctgaactcatcaataagtcactctctcttcggtgggcaagccccaggcaggagaggggagacatcacctcggtgctgggcccaaagttatgtcacaatctctttttgggcaacatctaagagaggagagacacataatatagtcaaagggcccagagatatgtcacaatgcaccttgtaggcagggtccaggcaggagactcacatcacattggtgctgggcccagcaatataccaccatgccttctgagggcagtgccaaggcaaaagagtaatgtcacctggccgggtgcggtggctcacacctgtaaacccagcgctttggtaggctgagaggggctggatcacctaagttcgggtgttcgagaccagcctgaccaacatgcagaaacgtcatctttactaaaaatacaaaaacaaacaaaccaacaaaccaacacaatatcaccttagtattaggctcactgacatgtcacaatatcccctgcaagcagaacctaggacaaggaggagagacatgttagctaggtgtgcacccagtgatatgtcacaatctcttctgtgatcggggccaggcaggagagagagccgcattacctgtgtgatgggtgcaggtatatgacacaatgtcctctgtaggcagggcctaggcagtagagttatatcacctgggtgttggacccagcaatatgtcacaatgacccacatgcacagggcacaggcaggagagtcacataacgtatgtgtgggacccagcgatatgacacaatgccccccgtggaagaaccaaggcaggagagaagattcacaccacctgggtacaagacccagtgatgtcacaatgtcccctgtgtgcagtgccaaggcagtagaataatcacatcacctcagtgttgggtccagtgatatgtcacaatctcttctgtgggctgggccagggctggagcaccaactcactctggtgctgggtaaagtcatatgtcataatcacactgtcaggaatgttcagcggtgagattatgcatctggagtgggaagaagcaacacatcaaaaatatgaccagaccatccacggcggctcatgcctgtaatcccagcacattgggaggctaaggtgggaggatacgtggagcccaggagttcaagactaccctgggggctatatggcgagacatctttattaaaaaatgataattaaagtttaaaaagtaatatatataaccacagcctggacaacatactgagaccatgtctctactaaaaaaaatagatagatagatagatagatagatagatgatagatagataggtagatagatagagccaggcacggtggctcacgcctgtaattccagcactttgggggccaaggcctcactcaaaaagaaaaaaaaaagaagaaaaaagaaatctaaaacaacagcaacttcagtgtgcaggaaggagcaagagaaagacaaaagaaacagaaaaagaaagaaataaataaaaataaaacagcggccaggcgcggtggctcacgcctgtaatctcagcacttcgggaggccaacgcgggctgatcacctgaggtcgggagttcgacaccagcctgaccaacatggagaaacctcgtctctgctaaaaatacaaaattagccaagtgtggtggcacatgcctgtaatcccagctactcgggaggctgaggcccgagaaccgcttgaacccaaaaggcggaggttgcagtgagccgagatcgcgactttgcactccagcctgggtaacaagagcaaaactccgtctcaacaagcaaacaaacaaaaaacagcaactcaatgtactgtggaaacaaacttgaagtggggctaggaaaacaaaaaaaagaaaacaaaaacagaaagatcccctgagcctcagctactcggaggccgaaaagaaaggattgcctgggtgagcccgggaaggtggaggtcgcagtgagcagtaatcgcaccctctactggatcttagcggttctgcagccgaggagagccatctggtccgtcttaaatatttcaagctggtggccaagtcctacactcttggccgacatctggtggacccggcggccggactgagaagccagcaggtagaggcccagcggatccaccctacaggccaagggtggcgctcgcggcctgaagctgtttttctggcatctaagtcgccaaccttccttcccaccgcgcccccaacccccatctgctgatcgatgtgggcggtggaaagaggagcaagggctcaagcgcagggactgcccccccggtgaccatcccacccgcggggtgggagagggcagggacccagactgccacccccgggccctcacagccatacctgggatggggcctgccgggccacacccccggacacctgcaactgaaccatccataccatgcttccccagccctatcccagccggtggatcgagctgccaccacccccactcccaggaatgaggggaggagccaggaaccagaggggtgggaggccaagcaggggagccccccaacccaaggcacccaccacgcagcacgccgtccctttcggcgctcggaaagccctcgggcgaacccctcccgagcccacccctcccgggacctcagaagatggctcaggacggcccctgactctccatggggacttgggaataaactcggcaggcgcctcagacagtcgggaccagcgtgggcgtccctggccccctgcgtcaggcctggtgggtcctgcgggtcgggcctcggcagttgcagtgcgcttgggatcagccggggcagccccacactcggctcgggctgggagcgcggggacagcctcccaagccacagccctgcgcgcccgacctccgactcacaagggacgcgccagagctctggtcccattgagacagttcagctgaaggctgcgggccttcccgagctccgcccagctcacagcggggacggtccctccctcggcagctgccgctggagctccggaggacaagagaacttagagaggtggcctcagtggagcccgacaaccagcgcgaacgtcaacaagacagatcgagatggcaagggcagctcgtgggcgaaatggatccacccgaccccagaaatgatccccgatacgtggctctgcatagaccacgacagagtccagtcaaagacaacccgtgggtgtgggtgtttgcagatgcttggagatgcatctcagcgggagaaagaatgaccaggactcggtagtgggtggtttaggacacagggagatacagaatgaggagactgtcccagaatccacacaaagacggacagacgacgaacggaaggaaggaaataaaacagaaaaaaaaaaaagaaagagaagagagagaaaaaaaatgaagaaagagaaagaaatatcaaaagaaaaatagagaaaataatgaaaagaaaaagggaagatgaaaaaggaaggaaaaaggtggagagacacaaaaagaaaaaggaagaaatgaaggaaaaaaggaaagaagaaagagagaggggaaaaaaagaatacaaagaaaaaagaagaaaataaaagagggcagagcatggtggctcatgcctgtaattccaacactttgggaggctgaggtgggagaatcacttgagcctaggaggttgagaccagccctgacaacatagtgaggccctgcctctactaaaagttagccaggcatgatgccacattcctgtagtaggaaggaaggaaggcaggagaggaggaaaaaaagggaggaaggtaggaatgttgagagaaaggcaggaaggaagacaggagggaatgaaggaagttagggaccaggttctacaaggaggaaatgttaaaaagaaacagagaaaaagaaaggaagagagaaacacaggaagaaaaagggaaggacagtaagaaagagacagaaagggagaaattatgaaaatagaaagaaaagaaaaaaagtagaaagatgaaaatacatctctaaaagaataataggcggggcatcgtggctcatgcctgtaatcctagcactttgggaagtccaggtgggtggctcatgaagtcaagagatcaggaccatcctggccaacatggtgaaacctcatctctactaaaaatgcaaaaatttgctgggcatcgtggtgcgtgcctgcagtcccagctacttgggaggctgaggcaggagaatcacacatacacacaaaacctgctgcctcaggctttaaacacacacgttttctgtaatccaggctcatttgattgtgagggctgttgtcagaaatgttactaagagaggaatatgcataaattagatcacatttaaggttatgcttataatgccacttgagtgggaagcaagagagtggagttacaggcacccagctggggtttacccacaccaggttggttctttctctttttttttttttttgagacagagtatcactctgtcactcaggctggagtgcagaggcatgatttcagctcattgcaacctccgcctcctgggttagagcagttcttgtgcctcagcctccggagtagccggaattaaaggcacgtgctactatgtccggttaatatttgtatttttagtagagacagggtttcatcatattgaccagccttgccttgaactcctgacttcaagtgatctgaccgccttggcctcccaaagtgctggcattacaggtatgagccaccgtacccggccaaccaatgccagtttctaggctcatgagagtgtggcacaggtaaacatcacctgtcattggtgacagaagaaaaaaggctggagggaagaccaggtgggggagaggtggtaggctgtggggctagaccctgggcatgctggacctgttaggtcactgaacatctatctggctggccacctgccccttcacgtcagttgaggaaaggggattgggcagcattctccataagtcccactgtgctgtgaggatggaggagtgtctacaaattgccatcttagggtaggttttagtgtgagctggactctcttggagagccaatgagatgggaggaagacagtcccccaggtaaaccttagggacagagcctgtgaagtaagagggggtgtgtggaggtggcctgtccctatgagaaggggagtttaaaactattacaggctgggcactgtggctcacgcctgtaatcccagtactttgggagacagagacgggtggatcacttgaggtcaggagttcgacaccagcctggccatgacagcgaaaccccagctctactaaaaatacaaaaattagccaggcgctgtggcacgcgcctatagtcccagctacttgggaggctgaggcaggagaatcccttgaacctgggagagggaagttgcagtgagctgcaatggcgccactgcagtccagcctgagcgacagagtctcgctctgtcaaaaaaaaagaaaaaaaaagaaagaaagaaagaaaagaaaaagacatttgaattctagtatctgtcagttcctctgagccaactggaaaatagatgcctttcaccttgaagtttgtttttgcttgtttgtttttttgagacagagtctcgctctgttactatactggagggcagtggcctgatctcagctcactgcaacctctgcctccttcaagcgattctcctgcatcagcatcagcctccctagtagctgggactacatgcgcacgccaccacacccggctaatttttgtaattttagtagagatggggtttcaccatgttggccagtatggtctctatttctagacctcaagacccgcccgccacagcctcccaaagtgctggaattacaggcgtgagccaccaggcctggccaccttgaagttttaagtgacaaccaaggatagccaccagtgtcttggttatggaagcctcctacgtgcttcccgcccccagtttgatttgcaggctcctggttgtgttgcagtaaacacgctttcctctggccttgtccaatgaatacggttcacacagctaacagtacttcttgagaggggttaccatgtaaagctgagaataaactgggtttaggtaacgttgtgcctccttatcacctgagaggccattgttcctggttcattctgtaagtgtattagtgctgtcagacatctttggacaattcaaatgaaaaggggctgtggttttataaaggaaacaaatgctttagatgtgaaatccttcttttattctccacttctcttacgtgaaaatttttgttttatttatttatttttgagacagtgtctccctctgtcatccaggctggagtgcaatggtgcgatcttggctcactgcaacttctgcctcccgggttcaagcgattctcctgcctcagcctcccgagcagttgggattacaggagcccaccaccacgcccggctagtttttgtatttttactagagacggggtttcgccatgttggtcaggagggtgtcgaactcctgacctcaggtgatccgcccgcctctgcctctcaaagtgctgggatcacaggcgtgagccaccgccccccgacgcctcagctcatttgttaattagcagtaattgcccgggtcagtgacacctcctacttgagcctctttccctgtccataaaatgcactaatactggggtgggtgggattgggaggtgggtcctggagctccatccaatcagtggcactggtgtaggaaccgcccgatcaggcgcgcagttggagaggagggcgtggcttccggcatttggcggggtctttgtctctcgctcccgccagagcttgggatcggtcttcactgttccgcgtcctctacctgggaaccaccgacccccgcccggcgactttgtcacagactctgttgccctgtgatctgcaggtcctgggagacgcacagccaagatgccagggcaccctggaagctgtgaagtggtgcgtatgcggggttgggcatcccttgaggcgagagcgggctgtgaaacctgcaggaccggcctccccacagtccgctcccgggtccgccgacctcagtcctctctggcgcagctcggccccaggcgtctctggccgcaagatggcggctgggcccgcggccgggacccccagcgtctcgccgcgtccctgctgggcgccctgtctggacctccctgggcagctctgcgcccgcagccccgagtatttcccagagtgcttagggatgccaggcgggtcatcagggtagaatcccgactaggtgtgtgcgtgggaggagctgcgacccgtggggttcccaagctttcctgttattttttttttcttttctttttagacagtctcgctctgtcgctaaggtaaagtgcagtggtgtgacctcggtttctgtaagctccgtctcccagggtcaagcctcccaaagtgccgggattacagggttgagccaccgcgcctggcctaatatattaatttataagaaatgcattcgagttgggttttagattttttaaatttatgaacacaggggactagagccactttagtctaatttcctgctgtttaattattttaacactccacagaggactcgttttcctctgtgccttcctaatgtgtggcaagcagggctctaatccacttttttcccttagcctaactcaggcttgcagtaaaattataaatttccacttttgttcctacattctcaaatgtgggatatgagaccaacttcccctgtccagtttacgacactatcaactatttgtcctttattgtacattagagacacggtattttaattgttaatcatgattttacacagcagtggatggtggcaggtttttaaagatttgttttctgtctataaacatttcacatgagaaaaatgtagaaaataatcctctgtcactccactgtaaaaaataaaaataaaaattatctctgcctctcccacttttatcttccctaggtacacacaccttattagtacgtcttcgggttgaagttttgctttggagaaattacagggccctttacagcagccctctggtcttttcttggtcatgagtttcagaactgtcttaaccaacccaggatgcccgtagtgaccatatctcttggagtgtctaatgaatatcatcccctgggtcatttcttagagggcagcctgaggaatgggagtatagcctctcagaggagcaactgggtggtctgggcctgaggacagtctcctggtataccatttgtctaaaaagctacctcttagaacattaagatttttttggtcaaaggaatgcttaggcaccactggtgggagtttaaatcagttcacctattgtcgacagtgtggccattcctcagagacctagagaaagcaataccattcaacctagcaatccagttattgggtatatacccaaaataatataaatcattctactataaagacacgtgcatgtgtatattcattgcagcacaattcacaatagcaaagacatggagtcaagctgaatgcctatcaatgatagactcaataaagaaaatgtggtacatatacaccatgggatattgtgcagctataaaaaaaatgagatcatgtctttcggaggaatgtggatggagctgtaggctgttatccttagcaaagtaacacaggaacagaaaactaaataccacatattctcactttaaagtgaaagttgaatgatgggaacacatggacacagaggggaacaatccatactggggtctattggaaggaggagggagaggaacaaaaaaagtaattaatgggtactaggtttcatacctgggtgatgaaataatcttcacaacaaacccccataacacacctatgtaaaaaatgtgcataggtaaaaatgtgtctcaaactcctgacctcaggtgatctgcccgccttggcctcccaatgtgctgggattacaggtgtaggttttttaaaaatttaggtagcttttcccataattccctaagagctttttttttttttttttttttttttttttttgagatggcgtttcactctgtcacccaggctggagtgcagtagcagtgtcttggctcactgcaacctccaactcctgggttaaagcaatcctcctgccttagcctcccgagtagctgggattataggcatgtgccagccaacacacccggctaatttttgtatttttagtagagatagggcttcatcatgttggccaggctggtcttgaactcctgatgtcaagtgatctgaccgcctcagcctcccaaagtgctggggttacaggcgtgaggcaccacgcccagtctgtgtggggaaaagagagatcagactgttactgtgtctgtgtagaaagaagtaggcataagagactccattttgctctgtactaagaaaaattcttctgccttgagatgctattaatctgtaaccctacccccaaccctgtgctcacagagacaagtgctgtgttaactcaaggtttaatggatttagggctatgcaggatgtgctttgttaaacaagtgcttaaaggcagtatgcttgttaaagtcatcaccagtctctaatctcaagtacccagggacacaatacactgctgaaggccgcagggacctctgcctaggaaagccaggtattgtccaaggtttttccccatgtgatagtctgagatatggcctcatgggaagggaaagacctgaccgtcccccagcctgacatgggtaaagggtctgtcctgaggaggattagtaaaagaggaagacctctttgcagttgagataagaggaaggcatctgtctccaggcatgtgtctttatagtagaatatagtagaatgatttatattattcccggagagtgatttatattattccctgggcaatggaatgtctcggtgtaaaacccgattgtatgttccatatactgagataggagaaaactgccttaaggctgcaggtgagacatgctggcggcactactctttaatgcaccagagatgtttatgtatgtgcacatcaaagtacagcaccttttctaaccttgtttatgacacagagatatttgttcacgtgttttcctgctgaccctctccccactattaccctattgtcctggaacatccccctctcttgagatggtagagataatgatcaataaatactgagggaactcagagaccggtgctggcacgggtcctccacatgctgagcgccgcccctgggcccacttttctttctctatactttgtctctgtgtctctttcttttctcagtctctcgtcccacccgacgagaaacacccacaggtgtggaggggcaggccaccccttcagtctgaagaataattttccactctgtgcaatttaagacaattatcttttttttttttgaaatggagttttgctcttgtgcccagactggagtgcagtggcacaatctcggctcactgcaacgtccatctcctgggttcaagcgattctcctgcctcagcctcctgagtagctgggattacaggcatgtgccatcatgcctggctaatttctgtatttttagtagagatggggatttcaccacgttggccaggctgatctcgaactcctgacctcaggtgatctgccctcctcagcctcccaaagtgctgggattacaggcgtgagccactgtacccggccctatctatgtatttttaatcaatgttgtccctgctttgtttatgacacaattttttctaggttttcaataaggcagagttttgctcttgttgcccagggtagagcgcagcggtgcgaccttggctcactgcaacctctgcctcccaggttcaagtgattctcctgcctcagccccctcagtagctaggattacaggcatgcgccaccacgcccagcttattttgtatttttagtgaagatgagggtttctccacgttggtcaggctggtctccaactcccgacctcaggtgatccgcccgccttggcctcccagagtgctggaattacagccatagccaccgcgcccggcctattgctttattttgtcttggtgagtagtcaaggaaataatcttaaattcacaatctacttatagtttgaatatatataattttgtgagaagaacacttgttatttgaaggtaatttttaaaaaattttgtaactttttaggtattcttaaattttaaattgtggttaaaaacatgcaatagtcatttcagacattattaggtgtacagtttagaagtattaagtgcagtcctgttgttttccaggaggttagagatgatttttgtcttacaaaagtaaaagcaaatactcactaaacaacaaattgtcctttccacctctctctagctcctgaagaaccccattttactttcttttttcatgactttgactaagtattctatgtaagtgtgattatacagtgtctctttttttgactattttattttacttgacatagtatcgtaaagatttatcattattgtagtatttgtcaagatgtccctattttatttatttatttatttggagtcgaactcttgctgtatctcccaggctggagtgcagtggcgccatcttggctaactgcaacctctgcttcctgggttcaagcaattctcctgcctcagcctcctgagtagctgggattacaggcacgcgccaccatgcccagctaatttttgtatttttagtagagacagagtttcaccatgttggtcaggctgagatgaccctatttcaaaagactgaataatatcctgttgtatatatgtgccgcattcgtttaatctactcatttgtaaagggacatttgcttccaggtattatcttttgtgagtcatactgcaatgtacatgaatgtacaaatatctgttccatgttttgccttgactatgggatattttgaatccactgatttagtgtcatgtatatactcttatttttttttttttattttgagacagagtctcactctgccacccaggctggagtgcagtggcgtgatctcggctcactgcaacctttgcctcccgacttcaagtgattctctacctcagccttctgagtagctgggattataggtgcgcaccaccatgcctggctaagttttttatttttagtagagacggggtttcagcatgttgcccaggctggtctcaaattcctggcctcaagtgatccacctgcctcggcctcccaaagtgctgggattacagacgtgaaccactgtgcctggctatgctcttacttttattgcctgatctcttgatgttgtgttccccaaatcattgccaaacccattgtcatgaagcttcccccttctgtattgttctaggagttttacagttatagattttatgttaaagccttagttcatttctttttttctgttttgtttcttttttcttttcttttttttttttttttgagatggagtcttgctctgtcgcccaggctagagtgcagtggcacaatctcggtttactgcaatctctgcctcccaggttctagcgattctcctgcctctgcctcccaagtagctgggattacaggtgcacgccaccactcctggctaagttttgaatttttcgtagatacagtgtttcgccatgttggccagactgctctcgaactcccgacctcaggtgatccagccgcctctgcctcccaaagtgctgggattacaggcgtgagccaccatactagacctctttttttctttttttttttgagggtctcactttgttgcagaggctggagggcagtagtgtgatctcggcttgctgcaaactctgcctcctgggttcaagtgattctcgtgcctgaacctcctgagcagcttggattacaggcatttgccaccactcccagctaatttttgttttttgtttttctttttttgagatgtagtctctctcagtcgcccaggctggagtgcaatggtgctatcttagcttactgcaacctccgcctcccgggttcaagcgattctcctgcctcagccttctgagtagctgggattacaggcgtgagccaccacgcccacctgatctttgtagttttagtagagatggggtttcaccatgttggccaggctggtctcaaattcctgaccccaggtgatccacccgcctcggcttctcaaagtgctgggactacaggtgtgagccactgcacctggctaatttttgtattttcagtggagatgggattttgccatgttggccagactggacttgaatttctgggttcaagtgattcacccacctcggcctcccaaagtgctgggatttcagtcttgagccaacacacccagccttatcttttatttatttgtttatagacagactcttgttctgtcacccagactggagtgcagtggagcaatgatagctcactgtaaccccaaactcgcagactatctttccacctcagcttccctagtagctggggctacaaaaatatgccaccatgccatgtctatttattttttgtagagatgaggtctcatgttgttcaggctggtcttgaacttctgacttcaagtaattctcttgtctcagtctttcacactgtaggaattacagtcatgtgccaccacacctggactttgctaactattttgtaatatgcaacacttttttattcatcattgtcatcctactgtgtaatagaaaaccagaacttactcttcttctttaattgtaacttaatatttgttaagtaacctcttcccatcctcccactttagtctctggtgacacctgttgtattctttgcttctataaaccctttttttcagagtcctcgtatgagtaaaattatgagatcatgaagtatttgtctttctgtgtatgacatttcacttaacatgatatcctcttggtccacccatgttgttgcaaatagcagaattttttttttttttgagatggagtcttgctctgttgcccaggctggagtgcaatggtacgatcttggctcactgcaacctctgcctcccaggttcaagcaattctcctgcctcagcctcccgagtagctaggattacaggcgcccgcctccatgcccagctaattttttgtatttcagtagagacagggtttcaccatgttgcccaggctggttgcaaacttctgagctcaggcagtccacccgcctcagcctcccaaagtgttgggattacaggcgtgagccacagcgcctggcataattttttttaatagctaagtagtattgtattgtgtatgtataccacattttcttttttcattttttttttgagacaaaatctcgctcttgttacccaggctggagtgcaatggcgtgatctcggctcaccgcaatctctgcctcttgggttcaggtgattctcctgcatcagcttcccaagtagccgggattacaggcatgtgccaccatgcccaactaattttgtgtttttaggggacggggtttctgcacgttggtcaggctggtctcgaactcctgacgtcaggtcatctgcccacctcaggcttcgaaagtgctgggattacaggtgtgagccaccggacccggccttttttctttattcatttatctgttgctatacatttgaattgattctgtatcttagcttttataaatagtgctgcaataaacacgggaatgcagatatctttttgaaatatggattttcttttttttagatatataggcagtagtggctgagcccggtggctcacatctgtaattccagcactttgggaggctgaggccggctgatcacgaggtcaggagttcgagaccagcccagccaatacggtgacaacctgcctctactgaaaatacaaaaattagccaggcatggtggcacatgcctgtagtcccagctactcgggaggctgaggcaggagaaccgcttgaaccggggagggggaggttgcagtgagccgagattgtgccacttcactccagcctgagggacacagcgagactccatctcaaagaaagaaagaagatacatacccagtagtaacattactgggtcatatagtagctctatttttaattattcgaggaacctccatactattttctataatggacataaatatttacactcccgccaacagtgtgtatgtgtttcctctttattacatcctcattagtgcttgtttttttttttttaagtatagccattctaatagcgttaggttgtatattattgtagtttgggtttgcatttacctggtgattagtttatgttgagcatctttttatgtacctgttagccattcatatgtttttttgataatacctgttaagatctacatatttttaatagattgtgttttattttagaatttcacagtttttaaaataattttgaatattaattccttgtcatatgtatagtttgtacattattttccttcattttttagattgcctcttcaccctcatagttgtttccttttatatgcaaaagcattttagcttgatgtaatctcattagctcatttttgcttttgtttcctatgcttttgaagtcttattttaaaaaattatttcccagtctaatgttttaaaacattttttctatgtttctgtttaatagtttcatagtttgtggtattacatttgagtctttaattcatcttgagttgatttttgtatataatgaggggtagggatctggttatattattctgtgtatggatatttgattttccctgccatttgttgaagagattgtcttttccccaaagtgtgttctcaataccattgttaaaaactagttggctttaggtgcatagatttgtttctgagcttattgggcacattgatctatgtgtttgtttttatgtgagtacaatgctgttttggttataatagccatgtagcaaattttgaagtcagatattgtgatgccttcagctttgcgcttttaaaaaaaatgtataaaaagtatttcctagacaagtggcagattacattttagaaacaaaaccatctttgaaaatactggccgattcttctttaaaacgtacaaataggtcttttaaaaaaacttaagttcaggggtacaagtgtacgtttgttgcactggtaaacatgtgtcatatgggtttgttgtaaagattaagcctaagtacccattagttatttttcctgatccttttcctcctccaaccttccaccctctgaaaggccccagtgtgtgctgttcccctctgtgtgtccatgtgttctcattatttacctcccacttataaatgagaacatgcagtatttggttttctattcctgtgttagtttgctagggataatggcctccagctctgtccacatgcctgcaaaggacatgatctcattcttttttatggctgcatagtatttcatggtgtatatgtaccacatttttctttatccagtctatcattaatggacatttcagttgatttcatgtctttgctatggtgaatagtgctgcagtgaacatacacgtgaatgtgtgtttataatagaagaatttatattcttttagctatatacccagtaatgaaattactggtcaaatgttatttctgtctttaggtctttaaaaaatcaccacactgtcttcaaccttagctgaacaaatttacactcccaccaacagagtataagcatttcttttcctccacaacctcgtcagcatctgttattattttgcttttttaaaatagccattctgactaaggtgagatggtatctcattgtggttttgatttgcatttctctaatcggtgatgttgagctttctttcagatgattttgatcacacataagtcttctttttaaaggctcatgtccttttaaaggttcgtgtcctttacccacctttgtttgttttttttctttttaaaggatcatgtcctttacccatctttttttgctttttttctttttttttaagtagagacagggtttcaccatgttggtcaggctgttctcgaactcctgacctcaaatgatccgccctcctcagcctcccaaagtgctgggattacaggcatgagccaccatgcccgtctttttttttttttttttttttttttttttttaaatatagacagagtcttgctctgtcaccgaggctggagtgcggtggcatgatcttggctgcaacttccacctcccagattgaagcgattctcctgcctctgcctctctagtagatgggattacaggctcccaccaccaagtttggctaattatttttttgtatttttagtagagatagggtttcaccatgttgaccaggctagtctcgaactgctgacctcaggtggtccacccgcctttgtctccaaaagtgatgattactgatgtgagccaccgcacccagacctatttcacccaatttttttttctttttttttttttttttttttttttttgagatggagtctcgctctgtcacccaggctggagtgcggtggcacgatctcggctcactgcagcctccgcctcccaggttcaagcaattctctgcttcagcctcctgagtagttgggattacaggcgcctgccaccatgtccagctaatttttgtatttttaatagagacggggtttcaccgtcgtggccaggctggtctggaattcctgacctcatgatccacccgccttggcctcccaaagtgctgtgattacaggcgtgagccgccttgcccggccccacccaatttttaatggagttgtttatgtcttgtaaatttgtttcttctagctgctggatattagacctttgacggatgcatagtttgcaaaaattttctcccataccgtaggttctgtttactctgttcatagtttcttttgctttgcagaagctctttagtttaattagattttacttatttatttatttattgtgattgctttggcatctttgtaatgaagtctttgcctgtgcctatgtcctgaatcatgttacctaggttgtctttcagggtttttatagttttgggtttttcatttaagtttgtaatccatcttgagttagtttttgtatagggtgtaaggaaaggatcaagttttaattttctgcaaatggctagccagtttatttattgaagagaaaattctttgctcattgcttttgtcagctttgtcaaaggtcagatggttgtaggtgtgcagcttaatttctggccctctattctgttccattggtctgtttctgttcttgtaccagtaccatgctgttttagtttctggagccctgtagtatagttgaaagtcgggtagtgtgatgcctccagctttgctattatttgtgtttaggattgtcatgcctattcagggtgttttttggaaagtttcatatgaattttaaaataatttttttctaattctgtgagaatgtcaatgcttgtttaatgggaaaagcatcgaatctataaattgctttgggcagtatggccattttagtgatatggattcttattattcataagcatggaaagtttttccatttgtgtcatttctgatacctttgagcagtggtttgtagttctccttgtagagatctttcacctcccttgttagctgtattcctaggcattttatcttttttgtggcaactgtgaatgtgagtttgttcgtgatttggctctcagcttgactgtcattaatgtaaaaaaatgctagtaatttttggctgggtgcagtggctcatgcctataatcccagcactttgggaggcccaggcagttggatcacctgagatcaggtgttcgagaccagcctggccaacatggtgaaatcttgtctctactaaaattacaaaaattagccaggcatggtggcgggtgcctgtaatcccaggtactcagaaggctgaagcaggagaattgcttgaacccgggaggcagaggttgcagtgagtcgagatcgcaccactgcactccagcctgggagacagagcaagattccgtctcaaagaaaaaaaagaaaaaaagaaatgctagtaatttttgcacattgattttgtattctgagagtttgccaaagttgtttatcagcttaaggagcttatgggctgagattatggcatattctcgatataagattatgttatctgcaaacaggaatagtttgatttcctctttttctatttgaatgccctttatttttcttgtcttttcttgctttttttttttttttgagacggagtttgctcttgttgctcaggctggagtgcaatggcatgatcttggctcactgcagcctccacctctgaggctcaagcaattctcctgcctcagcctcccaagtagctgggattacaggcatgcgccaccacgcctggctaattttgtatttttagtagagacaggtttcttcatcttggtcaggctggtttcgaactcccaacctgaggtgatccaccacctcggcctcccaaagtgctgggattacaggtgtgagccaccacactcagcctagatgccctttatttctttctcttttcttgttacccggaccagaagttccaatattatgttgaataggagtgatgaaagagggcatccttgtctagttttagtttttgtttgtttggttttttgagagggagtctcaccctatcacccaggctggagtgcagtggtgcgatcttggctcactggaacctccgcctcccgggttcaagcaattctccctgcctcagcctcccgagcagctgggattacaggtgcccaccaccacgcctggctaatttttgtatttttagtagagatgtggtttcaccatgttggccaggctggtcttgaacacctgacctcaggtgatctgcccgccttggcctcccaaagtggtgggattacaggtgtgagccacgcacccagcctagttttagttttcaacgagaatgtttccagtttttgcccattcagtataatgttggctgtgggtttgtcatagatgtcttttagtattttgagatatattttttcaataccttgtttattgagaggggtttttttgtttgtttgttttttgtttttctccagatggtgtctcactctgtctctccagcacctaggctggagtgcaatggcatgatctcagtgcagcctccacctactgggctcaagagattctcccacctcagcctcccgagtagctgggactacaggcgtgtgctaccacgcctggctaattttttgtatttttagtagagatgggttttcaccatgttggccaggctggtcttgaactcctgacctcaagtgatctgcctacctcagcttcccaaagtgctgggattacaggtgtgagccaccatgcccagcgtattgagagtttttaacatgaatggatgttgaagtgtattgaaagttttttatgcatctattgaaatgatcatgtggttttgttcctttttgtttgttggttggttggtgggttggttggtttttgagatggagtttctctcttgttgcccaggctggagtgcagtggtgcgatctcggctcaccacaacctccacctcccgggttcaagtgattcttcttcctcagcctctcgagtagctgggattacaggcatgtgccaccttgcctggctaattttgtatttttagtagagagggggtttctccatgttggtcaggctggtctcgaactctcgacctcaggcgatccacctggctcgacctcccaagtgttgggcttacaggcgtgagccaccgcgcctggctgattatgtggtttttgtctttagttctgttatatgatgcatcgtatttcttttttcctatttatttttttctgtctcccaggctggagtgtagtggtgtgatctcggcttctggcaacctttgtctcctaggttcaagcaattctcctgcctcagtcccaagtagctgggactacaggtgggcgcctccatgccctgctaatttttgtatttttagtagagacagtgatattgtttgattgagtctccattcagatctcaatttgaattgtgtttcccagaattcccatgtgttatgggagggaccggggggagattattgaatcgtggggtctgtttttttcctgtagtattctcgtgatattgaataagtctcacaagatatgatgggtttattagtggtttctgctttgcttctttctcattttctcttgctgctgtgatgtaagaagtgccttttggctactgccatgtttctgatgcctccccagccatgtggaattgtaagtccaattaaaccgctttttcttccccgtcctggttatgtctttatcagcagtgtgaaaacagactaatacagtaaattggtaccagtagactggggccttgctgaaaaaaaataaccgaaaatgtggaagcgattttggaactgagtaacaggcaaaggttggaacagtttggagggctcagaagaagacaggaaaatgtgggaaagtttggaacctcctaaaaatgtattgaatggctttgaaaaaaatgctgatagtgatatgaacaataagattccagctgagagggctgggcacagtggctcatgcctgtaatcccagcactttgagaggctgaggagggcagaccacgaggtcaagagatcaagactatcctggccaacatggtgaaaccctgtctctactaaaaatacaaaaatcagctgggtgtggtggcgcatgcctgtagtcccagccacttgggaggccgaggcaggagaattgtttgaacccgagaggcggaggttgctgtgagccaagattgtaccactgtactctagcctggcaacaaaatgagactccatctcaaagaaaaaaaaaaaaatcccagctgaggtggtctcagatggagatgagaaacttggaaccgaagcaaaggtgagccttatgttttagcaaagtgactggtggcattttgccctgccctagagatttgtggaactttgagcttgagagagatgatttaaggtatctggtggaagaaatttctaagcagaaaagcattcaagaggtgacttgggtacttttaaaagcactctgttttaaaagggaaacagaacataaaagttcagaaaatttgcagcctgatgatgcaatagaaaagaaaaccccattttttgaggagaaattcaagctggctacagaaatttgcataagtagcaaggagcctaatgttaatccccaagaccatggggaaaacatctctaggccatgtcagagattttcacagcagctcctcccatcacaggcccagaggcccaggaagaaaaagtggttttgctaggcatggtggctcatgcctgtaatcccagcactttgggaggctgaggtgggtggatcacctgaagtcaggagtttgagaccagcctggccaatatggtgaaaccccatctctactaaaaatacaaaaactagccaggcatggtggcaggtgcctgtaatttcagctactcaggaggctgaggcaggagaattacttgaacccaggaggcggtggaggttgcagtgagccaagatcatgccattgcactccatcctgggtgacaagagcaagacttcgtctcaaaaaaaaaaaaaagaaaaagaaaaagtggttttgtggcccggggcccagggtccccatgctgtgtgcagcctaaggacttggtgtcctgtgtcccagctactctagccatggctgaaaggggccaatgtacagctttggctgtggcttcagagggtggaagcctcaagccttggtagcttccatgtggtgttgaggctgtgggtgcacagaagtcaagaattgaggtttaggaacctccacctagatttcagaaaatgtatggcaacacgtggatatccgggcagaagtttgctgcaggggtggagccctcatggagaacctctgctagggcagtgtggaagggaaatgtggggtcagagcccccacacagtccctactggggtacagcctagtggagctgtgagaagaaggccaccatccgccagaccccagaatggtagattcacccacagcttgcactgtgcacctggaaaagctgcagacactcaatgccagccagtgaaagcaactgggagggaagctgttccctgcaaagccacaggggtggagctgttccggatcatgggaacccaccttttgcatcagcgtgacctggatctgagacttggagtcaaaggagatcattttggagctttaaaatttgactgcctcgctggattttggacttgcatggtccctgtaacccctttattttgtccaatttatctcatttggaatggctatatttacccaatgcctgtacccctattgtatctaggaagtaactagcttgcttttgattttacagactcataggcagaagggacttgccttgtctcagatgagactttggactgtggacttttgggttaatgctgaaatgagttaagactttggggatctgttggggaagcatgattggatttgaaatgtgaggacatgagatttggaggggccaggggcagaatgatattctttggatgtgtccccattcaaatctcaacttgagttgtgtatcccagaagtcccgtgttttgtgggagtgacccaggggaatgtaattgaatcatgagggctgttctttcccatgctattctcgtgatagtgaatatctctctcaagatctgatgggcttatcaggggtttccagttttgcttctttctcattttctcttgctgctgtgatataagaagggccttttgcctcccaccatgattctgatgcctccctagccatgtggaactgtaagtccaattaaacctttttcttctcagtctcaggtatgtctttatcaacagcatgaaaacagattaatataaatggggttggtggccaggtgctgtggctcttgcctgtaatcccagcactttgggaggccgaggcaggcgaatcacctgaggttgggagttcgagaccagcctgatgaacatggagaagccccatctctcttaaaaaaattagctgggcatggtggtgcatgcctataatcccagctacttgggaggctgaaacaggagaatcacttgaacccaggaggcagaggttgcggtgagccaagattgcaccattgcactccagcctgggcaagagcaaaactccatctcaaaaaaataaaaataaaaaacagatggggtttcaccatgttggccaggctggtctcaaactcctgacttcagatgatccgcccacctcggcctcccaaagtgctgggattgcatgtgtgagccaccacagctggcctgaataatatttcttaatttcagtatgttcaaccaaccttgcatttcagagatgaagcctacctgattctggtggataagttttttcatttgctgctgaatttggtttgccagtattttgttgaaattttttgcatcactgttcatcaaagatacttacctgaagctttctttttttgttgtactctgttgggttttggtgtgaagattgtcctggcctcatagaatgagttagggagaagtcccttctcctcaattgtttttttgtttttgtttttgtttttttgagacaaaacaaaactcttgtcacccaggctggagtggaatggtgtgatttcagctcactgtaacctccgcctcccgggttcaagtgattcttctgcctcagcctcttacaggcacacgccactaggcccagctaattttgtatttttagtagatacaggacttcgccctgttagccaggctgttctcgaactcctgatctcaggtgatccactcgccttggcctcccaaagtgctaggattacaggcatgagccactgcgcccagcctgtcgttaattttttgaaagaatttcagtagaaactgtaccagctcttctttttacatctggtggaattcaactgtgaatctttcttcccatggggactcagggaccatcctgtgtcatcttctgagggcccggaaggggtttgcctgtgggctttctaattgccggaagggacggcatgctgcatggtgggtgcccctgctgtgggttagggggtacccctgcttggcatcccgcccctctggttcctgcttccccccctcattcttgggggtgggggtggtggcagcttgatccccgggctgggacagggctgggggagcctggtgtggatggctgaggcactggtgtctggggatgtggcccagcaggctccatcccaggtaaggccctgagggcccagaggtagccgtcttggtcccagccctctcccaccccaggggtagggtggtcactaaggggcagtccctgcacttgagcccttcctcctctttccaccacctacggttgatcaacagacggggtcaggggcatggtgggaaggaaggttggcaacttagataccagaggaacagcttcaggccacgagcgcctcccttggcctgtagggtggacccgctgtgcctctgccagttggcttttccttctgtctgccaggtccaccagatgtttgccaagagtgtaggacttggccaccagcttgaagtgtttcaggtggaccagagggctctcgccggggtcagaactgcttagatccagcagagggtgcgattgtggctcactgctacctccatcttcccaggcttaccgaggcgatcctcccattttggtctcccaagtggctgcggctctggggatctttctgttttgttttgttttgtttttttccctaggcccacttcaagtttgtttccacagtacattgaattgctgttttttttttctttcttttctctctgttatgctccttcctgcatactgaagttcctgttattttagattttttcttttcttttttttttttaaatcaggctttggctcccaaagtgctggaattacaggtgtgagccaccatgcctggctctatctatctatctatctatctatctatctatctgtctatctgtctatctatctgtgggcactctatagataggtaggtaggtaggtggtaggtaggtaggtagaaaataaataagttttcatttatttatttatttattttgagatggaatttcactcttgtcacccaggctgggcaccatctccagtcactgcaaccaccgcttcctgggttcaagcaattctccatcctcagcctcccaagtatctgggattacaggcgtgtgccaccacacccagctaacttttgtatttttagtagaaatggggtttcaacatgttgaccaggctgatctcgaactcctgacctcaggtgatccacccacctcggcctcccagagtgctgggattacagtcgtgagccaaggagcccggcctatctatttttttagtagagatgtggtctcactatgttgtccaggctttggttatatatattactcttttaactttgtcatttttcattagagatgtctcacaatgttgcccccagtatcgtatcaaactccttggctccatctatcctcccgatttggcctcccaaagtgctgggattacaggcatgagccaccgtgcctcatctggttatatttttgatgtgttgactctttccagttcagatgcataatctcatccctgaacatcctgctggtgcgattatgacatatgattttacccagcaccagagggatttgatgctcctgcctgggcccaactcacagaagggattgtgacatatcactggacccagcactgaggtaatgtgactatcttactgccttgacactgcccacagaggacatagtgacatatcactgggtcttgtacccaggtggtgtgaatcttctgccttggttcttccacaggggacattgtgtaatatcgttgggcctcacacgtacgttatgtgactctcctgcgtgtgccctgtccatgtgggccattgtgacatattgctgggtccaacaactggttgatgtagctctactgcctaggtcctgcctatggaggactttgtgatgtatccctgaacccatcacacaggtaatgcaactctattctcctacctggccccttctcacagaagagattgtaacatatcactgggctaagcacctagctcacatgactctccccctctttctagattctgccctcagaggacattgtgacatgtcactgggcctaatactaagatgacatcattctttagttttggcactgccctcagaagccgtggtggtgtattgctgggcccagagccaatgtgatgtgagtctcctgcctggatcctgcctacaaggtgcattgtgacatacctctgggccctttgactattttatgtgactctcctctcttacctggatgttgcccaaaaagagattgtgacatactttgcacccagcactgaggtgatttgactgtcctcttctgcctgtgctttgcctacaggagagagagtgacttattactgagtttagcatacacatgatgtgattttcctccactcacagaagtcattgtgacatatatcttggcccatcactgagattgtgactgtctttttcctgggacctgtccacagtggagagtatgacactttttggccaagcacctacaagatacgactctcttcttacacctgggccactggggtgattttgacatgtagttggccccagctccaagattatgtgactccacacttcttcctgagccctacctacaggtagcattgtgtcatatctgtgagaccctcaattaggtgaaatgactctttgtttgggccctcttctcaaggtaccgtgacattgctgggcccagcatctaggtgatgtaactctactgtactgtttggtttctgcctaaaaagggattgtgacataccactctatcaagaacctaggtgaggtgactcctctccagcctgggacctgcatacattgcttattgacacatatcactggctccagcacctaggtaatgcaactctcctacatgggcccccacccataggggtattataagatatctttctattaatcacctaggtggtgtgacactcctcttctgcctgggccctcccaaaaaagtattgttacacatcactgagcccagcacctaggtgatgtgactcttctctcatgcatcggccctgccaactggggtgtttgttacatatagctgggcgcagcccctaggtcatgcgattcttttttttctgagccctacccacagaaggcattttgacatattttgagcccatcatttaggtgatgtgacccttttgcatgggccctccccacaaggggtactgtgacatattgctgaacccagtacataggtgatgtgactctgctctatggattgggctttggccaagcagggctgtgatgtgttgctggactcaccacctatgtattgtgattattctgttctgcctaagccctgcgtacagtgtgtattgtgacatatgcctggatttagcacctaggaaatgtgactttatggcatgggaactgtccacaaaagtgttatgacatctttttcatcacctaggtgatatgacccttttattttcccggttctggcatattctgggtatagtaacatatcattgagtccaatgcctatgggatatgtggctcctccctgggcccagcacatagagtgcctcattgacatatctctgcatccatagtctaggagatttaactcttctcctgactttcttctcctgcctagtttcttcacacaaaaagtattgtcacatatcactgggcccaacagcaacagtaacaatgatgttactctttggcctactgtttgccctcagaaggcattgtgacacattacttggccaacatcaaggtcatgtgcttctcctgcctggacgctgtcacaggggacattgtgacatatctctgtgtccatcacccaggtgaggtgaatcttttcacctgcctggtgtctgcttgctgggggataatgatatatattgctgatttcataccgagctgatgtaactcttctcgtcttcatacatcctgcccggaagaaaactgaaatattgctgggcccaacaccaaggttatttggcctggccccgccttcaaaaggcattgtgacatattgcagtgcccagcaccaatgtaatttgtctcctgcctacaccctgcctacttggggcattgtgacatgtcttggcccatcaactatttgataaagctctcctttcttacctgggtttttcccatagtagagattgtgaaagatctctgggaccagcacctagattatgtgactctcttcttttgcctgggccctttccacggggatgattgtgtcatatagttttacccagcccctaggttatggtttctgtgacatattgcttgactcagcacataggtgatatgactcttctccaccgcttggactctgtcaaggaggtattgtgggccaggtgtggtggctcatgcctgtaatttcagcactttgggaggtcaaggcaggtgggtcacctgaggtctggagtctaagaccagcctggccaacatggcaaaacgctgtctctaccaaaaatacaaagaaaaaaatagccgggtatgatagtgtgcccctgtagtcctggctacttgggaggctgagacaggagaatcacttgaacccaagaagtggaggttgtggtgagccaagatcattccattgcacttcagcctgggtgacagagtgagactctgtctcaagaaaaaaaaaaaaagaaggtattgcaatgtatcactgggactgacacctaggttatgatactctctcctgcctgagccctgcataaattgtatattttgacatagcactgcattcaacatatagctgatgcaactctagcacataggccctgctcatgggcatattaggacatatatttttcttcatcacctaggttatgtgaatcctcttcttcccagatcctgccaaaaggaaagattgtgacatatcactggaaccagcacttaggtaatgtgacttttctgctctgcctgagaaccacatttttggtattgtgacatttcactgtgccaaacacctaaacgatgggaggccctgcctcagccctgtccacaggggttcttgtgacatatatctgcatctattacataaaaaatgtgactccatttctacctgtcccctgcttacaggaaagattgtgacatagtgcagggtccagccaccaggtgatgtgtctctcctacgtgtgcattatttttaggaagaaatggtaacataccattggttgagaactcaggtgatatgactctcctgcctgatcagtgccgtcagggaaaattttacatatcatttgcccagcatccaggtgatgtgacggttctgggtactttctgtcaacaagtaggttggtaacgtatagcttagcccagctcacaggtgtgatgatgactctaatactttgtaccagccaatagaagagatactgtctctcacagctaggcttagaaaaaggggtaaaatcctgggtctcctctctgtatgaaggttatagagaattaatactctcgcatattgtataaagccctcagatggtacagagagtgtcgtcataggaaaaagcaaacagattagatcatgtttcttgtaagcacactgtcaatttttagaattaccactatcacacagggacagaacccacggaggagttcatgattctcatgtgcagatgcagtccatagttaaaattgtgatatcatatgtgaacatctggccacagttgagatggtgactcatttctaaacccaggtcataggcaggtgaggactgtcctctgtggacccagccattcggagaatgttgactctcatacctagacttagagccgcataagatcataggtccatagcaccacaaaaatctcagagcagattgtgactcatgcataccatataaagccctcaaatggtacagagagtgtcttgacagggccaagcacagaggtgagattgtgaccctcatattcacaaccagtcaacagtagagattgtcatctgcttaaataaacacaacccacttctgaggttctgaatctcacattgggaggcagttgaatgttggaaaatggactctgtttgtggattctgtccacagttgggttgatgactctttaaccaaaattcagcacacctttgtggctgtcacttcactaaggcacagggtttacaagagaaattgaggctctcatacacaaatccattccaccattgagattgtgacttcttgtacttagacccaacttgcaggagatgttgactctcattccttgactcaagaccttgtcatttttaatgtcaccaaaagaccttcttataggtgtgattgtgacatgtgcctctgcccaacgtctgagttatttgactctcacctgggcccagtacccagtgacatattaggggacccagacctttggtaatgtcactctgttctgccttgatatagcccacaggaggcattgtgacatatcactgggccttgcactcaggtgatgtgagttttctcttcttggtgctgccgcataggtgtattgtgacatattgttgggcctaagttatgtgactctcttgcttgtgttcttcccacttaggctattgtgacatatgcctgaggctaacacccagatgatataagtcttcatcctggaccctgtctacagaagtcattgcgatatatgtcttcaccaatcactgaggtcgaacgcccagtgatgtgactctccttcctggtccatgccctcagggaagattgtgacataccccggcccagcacacagttaatgtcactcttgtgcttgctgtctacccatgggtaggattgtgacatatatcgtggccaagcacaaagatgtaatgactgtcatacctcgaagaaagcaatagagttaatgttgctcctaggtaggcttaggaaaatgaggaagtcgtctttctgttcaaatctcactctctgacatatataaagccctagtgtgttacagagaatgtcataacagggctcctcacacaggtgagatcgtgttctatacacagcccaccaatcttgagaattgtcaccctcacacatggacagagtccactggtgaagtcctgaatcacacatgaatgcagttcacaattggaattgtgactgtcatcattgaacatctagccacaatttggatggtgattctttttttttttttttttttttttttttttttttttttttttttgagacagaatcttgctctgtcacccaggctggagtgcagtgatgcaatcttggctcactgcaacctctgcctcctgggttcaagcgattctcctgcctcatccccctgagtagctgtgattccaggcacccgccaccaagcccagctaatttttgtattttaagtagagacagggtttcaccatgttggccaggctggtctcgaagtcctgacctcgtgatctgcccacctcagcctcccaaagtgctgggattacaggtgtgaaccaccatgcccggcagtgattcatttctaaacccagcttgttaaaaggtgaggactctcctatctggactaaaccaatagtttagtttagttaggatagatgttgatgctcatatctgggcttggaaccacaggaaagatcttcttggacaaaggtcacagaggattaccactcttgcatattgtataaatcatcaagtgaaactatcataagagaacatagcacatgcgtgagattttgtcttttgaatgtacacccaggcaacagtaaagattgtcattctcccatattgaggttctgaatgtcagacacagagactgtgaaaagttgaataattgactctcacgtggatctggactagaggtggactggtgactctcagagcaagattcagcacacataagagtctgtgacttcactgaaaggacaagcctgcagaagaaattgtggctttcctgcccacattctgtcaaccattgatattgtgactcacatacttagacccaacgtacagaaagtgttgactcatacctagcacctggacatatatggaatttctactctaattcctggacttttctgcaggtgtgattgtatgcatctgctacccaccttagtgatttgactttgctgccttggcccagcccacagatgagattgtgacatatcgcttgactctgcaccttgatggtgcaatctccgctcactgcaacctctgcctcccaggttcaagtgattcttctgcctcagcctcctgaggagctgggagtacaggcatgcaccaccacacccaactagtttttgtatttttagtagagacggggtttcaccatgttggtcaggctggtctcgaactcctgacctcgtgttctgcccgcctcagcctcccaaagtcctgggattacaggtatgagccaccatgcccggcctcgctgggcctttcacccagatgatgtgagttatttttcttgcattggtactgctcacagggtgcattgtgacatatttctaagcccttcactcaggttatgtgactacttttttgcctgtgccctaactattttgcatgttaggacatattatgaggcccaacacctgtaaaatagaggctcctccctgggccttgtctacagagggccttgtgacatatctctgcatcagtcacctaggaaatgtgactccgtttttgcctgcactctgtccacaggaaacattgtgacttatcactaggcccaggtactagttgatgtgtctctggtaactgggccttgaccacagagaggattgttacctattgctgggctcagcccccatgtggtgtgactgtactgtctgtgtcctgctttcaggagaaggctgtaacatattcctggttgagtattcaggtgatgtgacactcctgtttggtccctgccttcagaaaagattgtgatgtactcctggccaaaaacccaggtgatgtgactcttatctctccctattcacaggtaagattgtaaaatgccttggtctagctcacaggtgtgatgatgttgatcctttttttttttttattttatttattttttttatttttggagatggagttgctctgtcgcccaggctggagtgcagtggtgtgatctcagctcactgcaacctccacctcctgggttctagggattctcctgcctcagcctcccaagtagctgggattacaggtgcacaccaccaatcccggctaatttttgtattttccgtagagacatggtttcagcatgttggccaggctggtctcgagctccgtacttcaagtgatctgcctgcctcagcctcgcaaagttctgggattacaggcatgagccaccgtgcccggccacaagtgtggtggtgactctcatacctcaaaccagccaataggagagatcctgtttcttatagctaggcttaaaatcatgagtatggtcatgggtcttcttgtacgaaggtcctagagaaataccactttcttttatactatataaatctcttactgtacagagattgccattccagcgttcagaacacaggtgagattgtgtttctcatatgcataccccagcaaacattaaaattgtcatcttcacacatggacagggtccactggtaagtcctgaatctcacacatggaaaaaatccacagttgaaattgtgactgtcatatatgaacatccggccagagttgaaatcatgagtcatttctaaattcagtttataggcaagtgagaatttttctatctgaacctgagagaataaaaggtggttttgaattagacaaaatagagctaaaagttcaaacaaatggtggaaggattgtaaaaatcttgcaaagaattccatgtgtggttatattgactaaattcaaaaaggtactacatggtttttctgtaaataaaaaattgaaataaaagcacaacaaggtactcgtaatgcactaatctgctttttagcaaactttgttaacggttataacagattgttgcttctttaaaattttggagtcattgtaacaaaataaataatttaggataatctgaaattctattttataacatcaagtgtttcaaatctctaacacttaacatgcttcccaaaatcatactttagtttcaaaattgcctttcctgattcctggcttttggatacttcagagggtccctggagtatctaaaagagaggtaaacagaattatttgacatgtttaggtacatgagattggcaaaatggtgtttattccatctttaggttatattttggtgaataatactaatatatgttccaaaattgtttgggatttctaaaattctaatatatggtatcaatggtaattaaggttgttatgttaagttattgtaaaccacagagatagccaaacttctttgtcaattgtgtttctaactgtaactaacctggacattttgttattcacagacaagtgttgtcttgtcttaattatttttaaaagatggtttatattaaactatagaactttcacaggtgctttcaaatacaggtttctgatagccttggagattgtgacattggaataaaggaaaaaaggacaggattcagggccgggtgtggtggcttacacctgtaatcccagcactttgggaggccaaggcaggtggatcacgagttcagatcgagaccatcctggctaacacggtgaaacccagactctactaaaaatacaaaaaattagcatggtggctggcacctctagtctcagctactcgggaggctgaggcaggagaatcgcttgaacctgggaggcggaggttgcagtgagctgagatcacaccactgcactttagcctgggcgacagagagagactccatctcaaaaaaaaaaaaaaaaaaaatgcacaggactcatgaggagctaaaatgttcacaaatatcaagcaaaacaagagttaagtaaatggactgcactcagaaaactaaagcaacctttttgacttttgcttggtatattgctgatccttgtttaattttttagagtcaaggaaacttgtttttaactactatttatggccttcaataattgagtaaagtatactcctatgaacaaaattaggaatatgtttgtttttctctgcctctttcctctagaatttggaaactatctgtgagtattctcaacttatggcaatatagttgtttgtatgagtgcaataagaatccattttctttagcaacaggatgcaactggagaaactgtttgtttgtttgttttaaccaaggctttgactgaaagggtatgcttccctttaaagagtcaagcttgacttgcagagatgataaaagccccttgaaaaaactgccctcatatccttgtctacacagtctctgtacagcgttcctgacctgtggtcagtgaaaaatatcactttttaacaggcctaggagctccaagtttgtcttgggaccttaaaaggaaaggattacccagctcacaggtatttgaggatacaaacacatggctgtgctcagctttagaaggtcttattccttgtggaagatttccatcgaagccaatctaaaaggcctatgtagagatagtcatttttgctcaccttatgcaaataatcagggcgagtataggactaaaggctatgttgcaaacaactcagtcctgttatgattttttcttttcttttttttttttttttttagatggagtctcgctctgtcacccaggctggagtgcagtggcacaatctcggctcactgcatcctccacctcccaggttcaagcaattctctgcctcagcctcttgggtagctgggattacaggtgcccgccaccatgccctgctaatttttgtatttttagtacagacaggatttagccatcttggccagctgctcctaaactcctgacctcatgatccacccacttcggcctccaaagtgctgggattacaggcgtgagctaccatgcctggccagaacccaatattttctacaatattttatacatttctttctacatggattatataaattgggctttccagcagaaaaaggaaaagaaaaagcatatgtctcaatgagagcacacaattatgagaatggcaaccatgtaaagaaaaattgcaaggacttagtgctgatgaggatttacagcaactaaaactagaaatgtaaaatgatacagtaaaacaatttaacggtttattgtaatgttatatatacatttatcatattaccaggatatccactcctaggtcattactaaagcaaagtgaaaactaatgttgaaatgcaaacctttttgtggctgtgtattgctaactttattttcaattgcaaaaagctaggtataaaccagttgctttatagcagttgaataaactgtggtgcatccataaaatagcatcctagttgtcaacaacaacaaaaaacaaattattgatctacgccacagtatgcatgagtcagacatgcatttccttcagtgaaggaagtaagatccaaaaggctacatattacatgatccaattatatggcattgtagaaaaagaaagttatagagattgattataatcaagctaggcttgatagctcaaacctataatctcagcatgttgggaggctgaggtgagagagttgtttgagtcagggattttaagagcagcctgagcaatataacaagaccttcctaaaaaaaagaagaagaaagcagaaggagaaggagaaggggagatggagaaatagaaggaggaggagaaaaggaaggggaagaaaaaagaggaggaggaaggaaaagcaggaggaagaggagaaagaataacaaaaagtagtagtagttaggacgatgaaacagttctgtgtggtactctgaagatgggtatgtgactctagacagttgtcaaatcttatgaaactgaacatcacagagaataaattttcctctgcaaaacaacacaaaacaaaaaaaatacattgatttggagtatatttagatacaatgtagaaaattttaaaaggagcttaacctaatagaaatgtattacctaaccctattaaagagggttggaatgaggccaggcatggttgctcatgcctgtaatcccagcattttgggaggccgaggcaggtggatcacctgaggtcgagaatttgagactagcctgaccaacatggagaaaccccatctctacaaaaaacacaaaattagctgggtatggtggcacatgcctgtaatcccagctcctcgggaggttgaggcaggagaatcacttgaacccagaggtgtatgttatgaagagccaagatcgtgccattgcactccagcctgggccacgagagcgagaactgcgtctcaaaaaaaaaaaaaaaaaaggttggaatgaaaggtcttaatttaaatcactttgaaaaacagtgttttgattgaatactgcaagagtcaaaaactatacacaaactgtattcttgttgttttttcataagcatatgaattagcaatttttaaaactatatgttggcatatacacacacgcatagtaattactgcctgttttttgaacttgaaaaatgttagcatcaaagggagaattttagaataaatgatgtgatgctggaccggagttgcgcatgtttttgtttttttttttttgagacagtcattgtcacccaggctgtagtgcagtggtgcattcctggctcactgaagcctccacctcccaggttcaagtgattttcatgtttgagcctcctgagtagctagaattacaggtgtgtaccaactcacctgactaatttttgtatttttagtaatgatggggtttcaccatgttggccaggctggtctcaaacccccttgatctgcccaccttgaccttccaaagtgctgggattacaggtgtgagccaccacacctggcctgttttttcaataagacttatgacacccacctcagacttccaagtatcctggaccctctggtgatatcctgtctctactttaaaaaaaaaataccaaaaaaaaaaaaaaaaaaaaaaaaaaccaccacagctctgttttttgttatttttttaaagtagagacagggtctcaccatgttgcccaagctcgtcttgaactcttgagctcaagcagtttgtcccttttggccttccaaagtgctgggattacaggcagtgtattacttggtaagaattcattaagctttgcatgaattaatgatttccacgtatatttctgtatgaatgttttatatcaacaaaaaattacatagtacatatttgcacaaaatgctaactcatctcagaataatggcagcatcttttggtttgtttatggtggaacacactcaggacaagatcatacagattgtaatattccaagaggagtattaaagccccaccccttgggtgaaactgtaggtctttttatttttacctcagtttggttcatggtatgttttttattttaagagaatgcaatttttttgttgttgttgtttgttttttccagaaaatgtcccctcacagcaatgattgccaacgccgaggcacctagcacagtgtcttgctcagtgggtactcagtatatatggaactgggttgattaaggcacaaaaccaacagcaaggttggttcagtgaagaataatttagtaatactggttagactaaaaggccatgacttagcagcaaacatttttacattcatttgagaaataatttacaattaggtcacctaaaaatgttaatttacagcggtggcatttaagcttggctgctctgtcatcacctatacagattaaaatcacactgttgcccaggttcaactcaagcaattctgatttaattagggtgttgcaatttgtgtttaggggatttttaacaccaccaccccctcccacccccacgctgccccaagtgatttttacatgcagtctgggatgaaaacaattggtttaggatgagggatggattcactgtgtgtgattatcatgagtgctgctgagatttgtcccatggctgcttctgactttgggattttgaaaagcagcgctgccattgtaaaaatcaaaagacagcttcaagatgtactcaaatactttgctaaactgcaacagaataaaatgtcttcttagcagctcggtctatagtcactttaattcaaggtaagagattgtttcaggtacagtagttttagtaagtgttgaaaatcataaatagcctacacataccaagaaactattttaatcctttgacatatttgacaggcttttccaaatcaaattttagcttacaaattgtcttttttttttgtttgtttgtttttgtttttgagacagagtctcactctattgccctggctggagcacggtggtgcgatcttggctcactgcaacctctgcctcccaggttcaagcaattctcctgtctcagccttccaagtagcagggattacaggtgtgtgccaccatgcacggctaatttttgtatttttagtagagacggggttttgctatgttggccaggctggtctcgaactcctaacttcaggtgatctacctgcctcggcctctcattaagtgatgggattacaggcatgagccacagcacccagccaaaaaattgtgtcttttttgacctctaacttttggatgctatagagtgccaatgcagcatataaaagaataagaaacagaattttttttttgttgaattacatggaaagcattgtcaaaaatgtttgatcttcaacttaatattttaataaatgttattaatgtttatttcaaaatgtatgaaatttccttttttttgagacggagtcttgctctgtcaccaggctggagtgcagtggtgcaatcttggctcactgcaaccccgcctcccaggttcaagtgattctcctgcctcagtctctcaagtagctgggactacaggcacacaccaccacgcccagctaattttttttttccttttttttcttttttttttgaggcggagtctccatctgtcacccaggctggagtgcagttgtgagatgtcgactcactgcagcctctgcctccagggttcaagtgattctcctgcctcagcctcccgagtagctgggattacaggcgccacacccagctaatttttgtatttttagtagagatggggtttcaccaggttggtcaggctggttttgaactcctgacctgacctggttttgaattcctgagcccgcctcaggctccccaagtgctgggattacaggtgtgagccactgcgcctagcctaatttttgtatttttagtaaagacaaggtttcaccatgttggccagtatggtcttgatattttgaccttgtgatccacccgccttggcctcccaaagtgctgagattacaggcgtgagccaccgtgcccagccaatgtatgaaatttctaaaaatctaatttatctgagtatatctaattgtcataattatggttattatgacaaattattgtaggctgaagacataatcgatttcttttatttgtttctttataaccatttttttttttaagacggagtttcacttttgttgcccaggctagggtgcagtggtgtgatcttggctcacagcaacctgcacctcccaggttcaagcgattctcctgcctcagcctcccaagtagctgagattacaggcatgcaccaccatgcctggctaatttttgtatttttagtagagaaggggtttcaccatgttgatcaggctggatggtctcgaacttctgaccttgggtgatccacccgccttggcctcccaaagtgctgggattacaggcatgagccaccgtgtctggcctctttataaccatttttttttttaagacggagtttcacttttgttgcccaggctagggtgcagtggtgtgatcttggctcacagcaacctccacctcccaggttcaagcgattctcctgcctcagcctcccaagtagctgagattacaggcatgcaccaccatgcctggctaatttttgtatttttagtagagaaggggtttcaccatgttgatcaggctggatggtctcgaacttctgaccttgggtgatccacccgccttggcctcccaaagtgctgggattacaggcatgagccaccgtgtctggcctctttataaccattttaagtcatttccacagttaatggtctaattctaatgcagtttctcaaaactccaaaagcttgcaaaattgtaaaatatagtgtctttaaggaggtttatgaaagtatgggtaaagtcgagtataggtttctgatcagtttgggattaattgtttggactgggtaaggactctgagaatcctaatgaagagattgattcttataaaactgctaacccaagcaaaacaaagattaattaaatattagaaaaatattctgccacatattgtgttaaatcagccagtactgaagttttttagacatgccatttgaatgaactctgtggcctaagtcaaattacctatgataacccctcagttttcagtgctgtgcacctaaattgtagaaacctggtatttaagaggacaaatttaatgttaagtgtggactcttggagaacctagacagccaacagctacttgttcattcctgagttcttaaagcttccattattaacagctctgcattccattactcatcacagaagagataaaataatctaaattaaatataaattaagtttgtggtgactcttctaaattactaaaataggttaagaccaattttttttgtcaagcatataatcccaataagacaatcaaaacttcttgtacatttctgctacctgatgagccatttaaacatttatacagaaattttatttaattgtcattttaatgcatgttttcttgtataaaagttttctcatgcaagagggttgatgttataacagtaactaaaaggatattaggatacatgttttctcatatcttcagtgataaagatacttatttctctagacaagttgtaaaactgttaaacaagatattaggctgggcatggtggcttatgcctgtaatcccagcagttttggaggctgaggtgggtggaacacttgaggtcaggagttcaagaccagcctgatcaacatagtgaaaccccgtctctactaaaaattacaaaaaattagccgggcatggtggtgcatgcctgtagtcccagctactcgggaggctgaggcaggagaattgcttgaacccaggaggcggaggtttcagtgagccgacatcacaccactgcactccagtctggagatagaacaagactccgtctcaaaaaaaaaaaaagatagatacagtagtattgagcaaaactaactaaattgactggattgcttttgtaattgcagattgatgacatatcagatccatttagagtggaaaaaatatgttggccatttaaaaatagtcattggaaggcctatgcacctaagagaacctcatgtatcttctgctactgaagtctaatattactaaattcaaaaaggctttaatgcattatgacaaagcatatgaagaaagccttaaggtgaagaaagccttaatagtctactgactgtggacagtaaaaccctttattatctagaacccagagattgagtctgcctgccatgtacactgaagcaagacatcaagactttgaaagctgggttgataatctcacaacttagaagggcccctccagactctttaattgtaaacccataggagatcttaaagctaaccagaaagatttctcctaaaaagcagatggatatctttatgtagatagcttttttaataagatcaaaaatcaagacacatttgctatcatgatactcttagttaagtttgtttatggctctacaaacaatagaaatttaaaaagcatcttttgtgtgcactcattgggtatacttatatgtagagaattttgcagccaacgtgtgaaaaaacataacatcttttataggtaaaaaatgaaaggcaggccaggcacggtggctaatgcctgtaatcccaacactttgggaggctgaggtgggcagatcatgaggtcaggagtttgagaccagcctgaccaacatagtgaaaccccatctctactaaaaatacaaaaattagtcagcgtggtggtgcactcctgtaatcccagctactcgtgggagactggggcacgagaatcgcttaaacccgggaggtggaagttgcagtgagctgaaatcgcgccactaccctccaggctgggctacagagcgagacttcgtctcaaaaaaatagaagaaaaaaaaaaaaaaactggaaggccaatatgggtgagaaattttaatgggacatttgttgtctcatcagaaacagaatgtgtgtccactgctcttaacctatttcacaagttaaagagaacttattcaaaataggttaaagagcattgccagggtgccattacttttctaaatgggcatcctttgataggtcttttttccccctggtttagagtaaatgaggcaatggttagaaatgtatcccctatcatagggctttatagcagattgcactgtaaaggctatggttacacaatagactttaaattttttgctaaagttgtgctgaatcatataatttctttggattacttactgtataaacagaagtgtctgcagttgctaattcttgtagttgcacatggagaaatacattgggtattacagagatgcagttgtaggggattaatgaacaggctgtttggttaaaataagtagactatagctaattatttgatctatgtaatgttagttggtggttcatgaggaccctggttaaaaagcacgcttcaaactcttcgtattatcctcctggtagtcaaaatagtagtctccctgctgcattgtattctcaaaagttagaaatgttttcatgcaatcacctgtagaatataaaattgtctctcactaactggaatgacagaaactcaaagacatatgtaactatgatgaaaccataacctaggaatgacataagaacaaagaccctaaataatggaaacagtggtactaaggccctgagttttggttacactgtgcactgttgaaaattttttgaacaaaattattagaggccatcattctggactgagcttgtgcactaggtccaaacagacaaaatcaaactgaaaatttaaggaaataggtagattctgtaggttttgtttttcttctgtaaacagcagatcttaacacaaggggtttccctctactcaaacctttaaaaataataataaaataataacctgaatttcttgattccactttacaaaacccatagttctgctatttcacagtggaatctgagactaagtacatttttgatggtgacagtgttatcaatgtctaaagttttggtctatcaaaatttagaagatgaccaaaaaaggagaaattgtttaattataccctaaatctaccccctttcatgtttaagtttggtcaataagtttttttgttgttttgttttgtttacatagtaaactgaaacctaactgaatgtgtaaatagactgtactcatttttgtaccaacaactgtgttttggccaataaaaggatgtcaaatgttcaaaccatgtttaaataaggaaaatcccaagctgtaatcaatctagctgttcctgtatttcacttctattttctgatgtcaccttgcttcttctgtccataaatctttcaccatcatgttgctgtgctggagtatttcagagcctactttggatccacaggctactcaatttgcaaatccctctttgcccaataaaactctgttaaatttagtttatctaaagttgtttttctttttcttttctttttttttttttttttttgagacggagtctcgctttgtcacccaggctggagtgcagtggagcgatctcggctcactgcaagctccgcctcccgggttctcgccattctcctgcctcagcctccccagtagttgggaatacaggcgcccgccatcacacccggctaatttttttatttttatttatttttatttttattttatttatttttatttatttttatttttagtagagacggagtttcaccgtgttagccaggatggtctcgatctcctgacttcatgatccgcccgcctcggcctcccaagtgctgggattacaggcgtgagccaccatgcccggccctaaagttgtttttcttttagaagttttcaaatgtattctctgatcaaaaatgaataatctgttgttgggctttgattttctaaactcatccctcagctatttttccaaattattctatgtcctttcaaaatgtttctgcaatttttttgagatggggtctcattctatcacccaggctggagtgtagtggtgtaatcaattatggcttactgcggcttttaccttccatactcaagccatcctcctgccctagtcacagagtacctcggactacaggcatgcaacatcatgcttggctaattttttttcatgaagacaggattttactatgtcgcccacgctgtgtttgaactgctgagctcaagttattctcccatctcagcctcacaaagtgctaagattacaggtgtgaaccaccatgtgcttctgcaatttcttgacaggattatttccaataataaacagtactatgtgggcacaaatctaaaaaaaaaaaaaactgtcttcttttgcagaagtgtcactctccagaatttcaagggtctgtggcagttactctagtaatatagtttgatctatggaggtgcctgagctttggagtcagaatttatcctgaggttcagcccagccaattagtagctttgggtctttggacaagtttcttcatgtgaaagagttgtataaaccacatatgcaaaaaaggcagaatgatactaattgcagaaattgcagcaatttttcatccctcctatatcctttgccacgtgcttttttacagccgttcccattgagatatggaatctgttttccagaccctagatacggctgaccttatttcctcaggtcagtagaaacctgtgaacatgaccgtgtgccagtttggggcctaggctcaaatggtcttgaatgcttctgcttttctttcagaatgctgccctctccatgaacaaagcacatgttagccagctggaggataacataacatggtgggtggggaagagaagcaaagtgcctctgttgacagaagcagaagctcacccccagaagcagaagcttacccccagaagcacagcttcctagtcaagaagcagttgttgatacatgtctgaaggagctcagctgggaccagaagaatggccccagtgagcccagcctaaatggctgaccatctcaattattacctaataagttttggatggttggttatgctgcaatagctaactaatacatgcacccagtgcagataggtgccatgatttaatgacaggttgattactagttaccttctaacagtgggctccataaaggtactaatattttcccctgatttaaagttagatgtgttgtaagataatgttgagtaacgctgcaatacatgtagatatgtatgcatgtgattggtccttagtccccgcacgcacaggagaaaacgtaaaactacatcctgacacttagggccaaggccaaatagcaaaataattttgcctttaatctgttttcttcatatctaacattggaggtccagactgtggacagatctgaagacatagagttttcttcccctgtggccccatcatcctttgttcagtgtctgatctctggaagaaaggtggtcaccagatagtgatctacctgtggttattctgctttttcttttcttttcttttcttttctttctttctttcctttctttccttatttcttttctttctctcttttctttctttctttttctctctctctttctctcctcctcccttcctcctttccttccttcctttcatctcactctgtcaccaggctggagttcagtggtacgatctcggctcattgcaacctccacctcctgggttcaagcgattcccctgccttagcctcccgagtagctgggattacaggcgcgcgccactactcccagctacttttttttttttttttttttgtatttttagtagagacggggtttcacttgttggccaggctggtctcaaactcctgacctcagatgatccacccgcctcggccccccaaagtgctgggattacaggcgtgagccaccgcgcccggtctatgttcttttgatttgtgaatattcatatagcgtattatttataaatacatatgatcttacacaaaaggttaaagtcagtaccctctggggtgggcctgtctcagttcagggaggaagtcctgcccgaaaaggctgcagcctacgctgtcactcttcattcagtccagcatctgatcacatctgtcactcagggcctgagggggcggggccttaaacgttatccaatcggggacactgggcggggggccgtccaatcaggcccgcagctggagcagacagggcggcttccgggatttggcgcggcctttgtttctcgctgccgccgaagctccaattttcgtctgtctgctttgtgtcctctgcacgtagaagcccagcctgtgtggccctgcgacctgcgggtattgggagatccacagctaagacgccagggccccctggaagcctagaaatggtgagagtgccggtccgacatcccgagagagggaacggggctggttggaaccggtgggaagcggctgtggcgggacccaggcctccccgcagtcagcttcacaatctgcgcccagagttcttgcccagctcggcctcagtccccttcagccatacgatggcggccgcgctgacagccggggccccggcgtcctgtctcttccctgcactgtgactgtgccctgccctggagccctctctgggcagctctgcacccgcagcgctgcgtctctcccagattatgcaggaaccagagaggatcgtcagaggagaatcctgactcgggctgcgggttcatgaatgggaagagctttggtctgtggcgttcccaattcctctttccttctgttaaaaatttatgggagtcatcaccaaaatattaaagaatttaattaaagaatgattctaaaattgtagagcacccagttatggggtgtagcttgttatccatgggacgggcttgaaggaaagactttcataagatgcatgatgcaaaaacccaaattcagtaatcggttaggtacagttacatagtttctaaatttgcaccttgagcgtacaaattttctggttatgtaatcagagcttaataggcagtttatagtttgttacgcctaaattttgttttccttaatgtagtaatttacaaaaaaatacatttgagttacatttttttttaaagtaggaatccaggcatcgcagccacgtacctcgaattgcctgtcacttaactattttcacactccacaggagactgatcttctgcatttttttttcatgtttctcaaacggggtctcaagtctacccctcaacccccattcctccagcctaactctgtcttgcagtaaaatactaaatttccagtttcttctgattatcccaaatgccaactttccctctctaattcacattattatctgtttgtcctttagggtacatttttgatactgtattttaattatttttttacaaaccattgggtgggacatttaaaaagatttgttttctgtttgtaaatatcgcccatgaaaataaaccaaaactaattccctgacactgtattgtaaaaaaatctctgtgcctctttttcttttgtctcccctaggcacagagatcttgtgaaagtgttttggggtcaagtttgttttttgttttttttttttgtttttttaatttttatgggatgatgtattctcagccaccctttagttttttcctggtcctggttttcagtactggctgtgaataaaccagggtacacaccatggctatgtctgctagagtgtttgatgattattagcttctgggtcattttctctcacaggacaacaagaggtatgaagtgtagtctctcaagagagcaggtggatgccctggggctaagaggaatctcctggtgtctttgaaaagctaaccacttcagacattaacattgtcttcacccaacctagcttccctttcttagagacacattgcgggtcagccaatcttatgcgggtattgagggaaaaacagaagtgatttctgcccctcggattctctgagattcatggaaaaaatagtatccaaatggcagattttacctattcttttatttggtagcattctacaaccaaatgttgtagataatgggtgagttacaagatttatgaaatcatcggttgttatttttgcagggtaaatttgtgacagtgaatatctctgttctctatcctgttatcttaatttctgagtttaatgctaaattttataaaaagaaaaagaatcatctgcaaacagagattgttttaatttcctctcttcctgtttggatgtgttttatttctttctcttgcctgaatgctctggccaggacttccaattttatgttgaatagtgggggtgagagaaggcattcttgctccagttttcaagaaggaatgtttccagcttgtgtccattcagtatgttggctgtgggtttgtcatagataactcattattttgaactatttgccttcaatgccaagtttgttgagggtgttaaacatgaaggatattaacttttattgaaaactttttctgtatcgaaataattttgtggtttttatctgtagtttgtttatctgattaatcaaacatattgatttgtgtatgttgaacaaaccttgcatcccagggatacaacctacttgatcatagtggattagctttttaatgtgctgctggatttggtttgctagtattttgttgaagatttttacatcagtgttcatcaaggatattagcctgaagtttcctttttttgttttatctctgccagattttggtattagaatgatgctgttgccaggagcagtggctcacgccatctcagcactttgggaggctgaggtgggtggatcaggaggtcaagagatggagatgatcttggccaacatggtgaaaccctgtctctactaaaaatacaaaaagtagctgggtgtggtggtgcacacctgtaatcccagctgctcgggaggctgaggtaggagaatcacttgaacctaggaggcagaggttgcagtgagccaagatcgcgccactgcactccagcctggcgacagaatgagactccgtctcaaaaataaataaataaataaataaaaagaatgatgctgcttttatataatgagttggggaggagtcccttcttctcaattttttaaaatagttttgtaagatataatacttgtttttctttgtacatttgttagaattcagctgtgaatctgtctggtcctggactcactttctttcttttttttttttttttttctcaggcagagcctcgctctgttgcccaggctgaaatgcagtggtgggatttcggctcactgcaacctccacctcccaggttcaagcagttctcctgcctcagcctcccaagtagccaggactacaggcgggtgccaccatgaccggctaatttttgtatttgtagtagagacagtatttcaccatgttggccaggctggtctcgaactcctaacctcaggtgatcctcccacctcggcttcccaaagtgctgggattacaggcatgagccagcacaactggctggtcctgggctttcttttggttggtaggctgtttactactatttcaattttggagcttgttattggtctattcactgattcattttgttgtttttgttcagttatgggaagatggatttttccagaaatttatccattttttttttttagattttctagttttcacagagaagtttgtagtagacttcagtacttattcatatttttgtggggtcagtggtaatgtcgcttttgtcatttctaattgtgtttatttggttcttcttttttcactaatcttattagtggtttattaatcttattaactttgttataagataataagataagtggttattatcttattaaatttttcaaaagatttaactcaatagatttcttatttgtatgacttttcatgtctaaatctccatcagttcagatcttcttgtcttctgctagcttaggagttggttttctcttgcttctttcattcttttatttatgatgttaggttgttatattgacctctttctaactttctgatgtgagcatcaaaaagtgctatacatttccctcttaccactgtcttagccatgttgcagagattctagtatgttgtatctttgttcccatttgtttcaaaaaactgcttaatttctaccttaatttcattatttattcaaaagtcattcacatgcagattctttaatttccatgtaattgtataatttcaagtagttttctttgtgttgaattatatatttatcaagctgtggcctaagaatgtgtttggtatgatttgggtattattaaatttgctgataattgttttatttctgattgtgtggtcagttttagagtatttgacacgtggtggtgagaagagtgtatactgtgtagatttcagatggagagtgttgtagatgtctattaggactatttggtcaagcatttagttctgatatctttgttaattttctgcctcagtgatctgtctaatagtgtccatggggtgttgtaggagtcagaatctaaatctcttcatagttctctaagaactttgtgtgtgtgtgtgtgtgtatgacagagtcttgctctgttgcccaggctagagtgtagtggcacgatctcggctcactgcaacctccgcctcccaggttcaagagattctcctgctgcttcagcctcctgagtagctgggattacaggagtgtgccaccatgcctggctaatttttgtattttcagtagagaccaggtttcaccatgttggtcaggctggtcttgaactcctgacctcgtgatccacctgcctcagcctcccaaagtgctgagattacaggcgtgagctgccatgcccagcagaacttgttttattcatgtgcgtgcatggatttttaataacatattttttctgtctgctttttttcataaacattctttcaagtgcataccgtatgcccaaggctacagcttagatgtctgcatccagtgtctactgaagttcagatgtccagtgttcaagaacatgtccagagacttggctgttgtagaaaaaagtataaattaaagataagaggctttattctcttacgtgaaagtaagggaggatattttgttcatctctctttttttaaaacatttagattacacgtagatagttttctctgctttttagaaatatatgtaaatcatagtaacagctatataaaccttttgttattctttctgactcagaattgtcttcatctaggacctcagaaccattgctttgtttttgctttggcaaaggtttttttttgtttttgtttattttcatttttagtcttttaaagtagacacaaatttgtttaaagctttttttttttttttttttttttttttagacagagtttcactcttgtcgcccaggctggaatacaatggcacgatcttggctccttgcaacctccacctcccagttcaaatgattttcctgcctcagccattcaagtagctgggattacaggctcctgccaccacccttgactaatttttttatatttttagtagagactgagttttgccatactggccaggctagtctcaaactcctgacctcaggtgatcctcctgccttggcctcccaaagtgctgggattacaagcgtgagccaccacatcgggccgtttaaagcttattttaagagcacacaaaagttgagcacaaagataagattaaatttagcaacacagaatgataaagaataaaaaagatactgagtaaacttttttgacagaaaactgattatccaaggtaattatctcatatttgcaggctaaagtacttacactgcaaaggcaagaacagttcagtttattcactaaatagtggaatctgtaggtggactttggtttctgttacttcagaacaattagtatagttaggtgtagtgtttgtagacaacttgcattcacacaaattaacattttgtataatagtatgaatataaggctacaatatttgaataaatccctttagtcattttaatattgttatttatactcttgaaatataaagtgttttaactgaattatggttatagatatttttaaagttctacatacattatgacaagtacattaaaattatttatacttagatatttatatctaatatccaaagaaaattcactacaaaattgttacagttgttattagtttgacatgcttattaatttatccaataggataattataggtaagcattgttttagtgtctttcatttcactgaatttgaatgctgcttttacaggacaaataaacataatgggctatgtgaccacccaaaaccataatagctcttcagttagctatgttgcaagctcaaatatattccactgtataacaaagtcagattccagtttttcatcaaaaagtgctggtgaaaattgtcagatgtattccaatatagatccccaattcactggttaggagatgggagagcagcagacatgaaaaagaaaccttataggccagacacggtggctcacgcctgtaatcccagcactttgggaggccaaggcaggtggatcacgaggtcgggagatcaagaccatcctggctaacatggtgaaaccccgtctctactaaaaactacaaaaaattagccaggagtggtggcgggcacctgtagtcccagctacttgggaggctgaggcaggagaatggcctgaacccaagaggtggagctttcagtgagccgagatcgtgccactgcattccagcctaggcaacacagcgagactccaagactccatctcaaaaaaaaaaaaaaaagaaaccttataaaattctgctgagaacatgcctttttttttcataatgctcatgtttctcatgctgagagtagccatgcattttgagtgtttcaagaaaaattccttttgggggactatcttctggccaagttgatcagtcttacatctaatctgagttttttcttaagatgcttttagcttattttttctttcaatataatcttgctcagattgagagctgtttttctctccaatgctttgggtgtctgtttcagaaaccctattagtatcccatggtctctgtgaatgaggtgggttgtcacagggagaatattcttggagttatctctatctggattcatgctggaaatctagcagtacttttttttttatgtcacccttataaatagaaactgagggtgaaatactgctcccattcccattactgtgaaggtgcagttctacccaggaggcctgcagtctcctctccctgcagcgcaggctccactctctgatgtgacactagagtactgctgtggcattggggttcatgtaagatgtgaaccagcagctttgagctgtgtgttgtgggctgtgtttcagtggaagttggtaggcgtaaagagaggacactggccactaggagaacgcaagcagggtgctgcatgttctacattctgtgagaggttccgagagtaaatagaatctgatggccaaatctgtaaatgtaaacaagcatcttaggagtgaaagatcaaggctacaaagtatccagagccataaccacaactatacctaccagtaaaatgcaagactggaatacagtattgttgtccttcctcttactgaagagctagaatcaggacaggtgatccaggttctggagctcgaccagagcagttccattttttatttagaatcagcctgagtctctcctgcctggcttatcattgggcaatcaacccagggtaactgggaaccctctcacaattacctagccatctttgaaacatttgagaatatccagagcagaattttatcaggctgacaagagtggttaatgctacttctttctcagtgtaaaagaaatgagtcattctgtgtttgttcctccctcatacaagagataattttggttggtactcagatgatagtttccccagttttcttgtacttgggtgaaaaacaaggaagaggtctagaaactaaaacagataaactgattgctttcatttcatattatcattagaaaaataggtagagcagttatggttcttatcatacagaaacttttagtctagactagtgatatggcttggctatgtcaccacccaaatctcatcttaaattgtaactcccacagtttctacatgttgtggtaggaacccagatggaggtgattaaattatgaggggaggtgtttcctgcactgttctcatgatagtgaatgagtttcacaagatctgatgattttaaaaatgggagtttccctgcacaagctctcgttttgcttgccaccatccacgtaagatatgacttgcttctccttgccttctgccatgattgcgaggcctccccagccatgtggtattgtaagtccattaaatctctttttcttcccagtctctggtgtgtttttatcagcagtgtgagaacagactaatacaaaaaattgttaccagtagagccgggcattgatgaaaagatacctgaaaatgtgcatgtgactttggaactgggcaacaggcagaggttggagcagtttggaggtctcagaagacaggaaaatgtgggaaagtgtggaactccctagaaacttgttgaatggctgtgaccaagatgctgataatgatatagaaaataaaatccaggctgaaatggtctcagatggacatgaggaacttgctgagaactggagcaaaggtgacttttcttatgttttagcaaagagactggtgttattttgccccttccctagagatttgtgaaactttgaacttgagagagatgatttaggttatctggcagaagaaatttctaagcaaggcaggtctctgttgagccatggatgccagtctctgttctgcaggataggttttgttaaagttgttaaaaataatgcctattttaagagataacaaatgaaatttagaggacaagaggataaagctaattactattcttggaaatgcttgatgatacaggataaaaataaatacaacacacccaaatacaggatgatagtttttttgttagttgggttttttaaagcataatgcaggagtagatttattatagctactccaaatgttgaagagtgatacagtgaccacagagttaaaaactctcactgttattgctgtttattttacaataattggtttagtctacaagtttaaggcaaacatactaatgcatttgcttttcttcagaaatcataaagattacataaaatctgtaccaaaacttctaagaaatattcagtagttaaaaataagtctgattaagatgctttaccaggatacatgaatgaactaaggtggtatataatgcttttttaaaacaaaattttaaaaaattctgttttaaaggcaataaaggcaatctttatcttgtttgaacaatgcattctgaaaaggttaaacttcagaaattatttaaaggtaaataagattggcatccataaggaatactatttataaaataaatgcagttatagaggctactttaaagaagaataaaacttggacttctgagtatgatgagtgcacaataatgggccactatcttggggaacacagtgcggcattacaccacacagactggcatcgcctgtacatggtgctgctccatgcttctcagaaaaagagtagatccattttgtcagctgttttttatttgtttccagtgagcataaatgcgtaacatcattaagaaaacaaaaataaaatttgaaggaaggcagcccttttcaacaggaaggcagaatgtggcttatgtgtctccgtttagcactgccaggcagtttggcagcaactgtaggttaccctttgcatgcttcagttctaactctgccagttccactagtttttttttttttctgaatgcagcaatgcttcttgtcttaaaatctataagttcttgttttgcagactgagatttttttttttcaaatttctgactacataattgttgggaagttttagccagcagaacatctttattttttgctcttgctttatccagtgctatattagcattttcataatccagtagtgacctagaccttcaatacaggagatccttagcagcttgagtttctcttaagtaatatttttaagggtcagaaagtttgaggtcctcatcagcagacactcatgcttctatttttcttgttttatcaaacatttctgaaactttgagaaaaaacttgcgtatatctgtagaatcccgagttcctaaagcatataatgaagaaccaattctattgtaataatctgcagcacttttgtgggatcttgtccttctatgagttagcagatgcatccttatctcggttatgatattctaaaagaaatgtttgttcatgctcaaagaaattatctacatcctttactccggaaataattactccatctgctgatttaaccatgtttttaaagaaatcttcaagtttctctttttatttttccttgcacactcaaatcttgattatattccaagaagacatggaaatttaaatattttctcaaaataggatgtgctgtcacatgacataggaacacttcatgcatcacaactgtgttcttggatattcccaaatattcagcttccagttcctgtttcatctttgtgaattcttcctttgtcattgacccttctccttctccaagcttctgtactttttcccttgaagcatcaaaatcagctcttggtggtgctggtggaatgatgtaacctgcatagtcttcatttttaacaaaggaatcatgaagccagataaattgctcatgttgctgaacaacagaaaactcattttgtttaaaatttggcaataaactctttgtgtgaatggtgaattttactttattccgctcactaagagcatcagaaatgtccaccagcagagcaggatcactttgaagatctacatttattgctttaagtccacagttctcttcctgagaggaagttagggccatcgtccaggtcttccatcctggctgctccacaggatgatagtttgtgtaacaaacaaatattgtcagattgcttatacccgtatagaagaggatgtgatattacacacagcatatgctcgtaaactgccaaaatatgatgtgaaggttggcctaaccaattacactgcaatgtattgtactggcctgctgctggcctgcaggctcctcagtaggtcaagatctgtgacctatggcatggacaagatctgtgaaggccaagtggaggtgactggcaatgaatacaatgtggaaagcactgatggtcagccaagtgccttcacctgctatttggatgtaggccttgccagaactaccactggcaataaagtttttggttccctgaagagagcagtagatggaggcttgtctatccctcacagtaccaaacagttccctggttatgattctgaaagcaaggactttaatgcagcagtacaccagaagtacatcataggccagaatgttgcagattacatgcactacttaatgaaggatgatgaagatggttacaggaaacagttctctcaatacataaacaaaagcgtaactccagacttgaaggagatgcataagaaagctcatgctgctatgtgagagaatccagtctatgagaagaagcccaagaaaaagaagtggaaccatcccaaaatgtcccttgctcaaaagatcgagtagctcaaaagaaggcaagcttcctcagagctcaggagtgggcttctgagagctaatccaaacaattttcaatgaggattttttagatgaagaaaataaacttattgacagcaaaattttaaaaaaattaaatttataagcagcaaagcattcaagagattacttgggttctgttaagggcattcagttttaaaatggaaacagagcataaaagtttggaaaatttgcagcctgacaatgcaatagaatagaaaacctcattttttgaggagaaatttaagccagctgtgggaaaaatgtttccagttcatgacagaggtcttctctgcagccccttccatcacaggcccagaggcctaaaagaaaaagacggctttgtgggtcaggcccagggctcccctgctctgtgaagcctagggacttggtatcctgtattccagccactacagtcatggctaaaaggggccaaggtagagctcaggctgttgtttcagagggtggaagccccaagccttggcagcttccatattgtgttgagcctgtgggttcacggaagtcaagaattgaggtttggcaccctccacctagatttcagagctatatgggaacccctggatggccaggcagaagtttgcagcaggggtgaaggcctcatgaagaatatctgctagggcagtacagaaaaaaatgttgggttggagaccccacacagagtccttactggggcaccgcctagtggagctgtgagaagagggccattgtcctccagattccagaatggtagatccactgacagcttgcaccatgtgcccggagaagccacaggcactcaacaccagcccatgaaggtggccaggagggaggctgtaccctgcagagccacaggggtggagctgctcaagacgatgggaacccactttttgcatcagcatgacccaatgcgggacatggagtcaaaggagatcattttggagctttaagatttgactgccctgcttgattttggactcgcatggggccagtagcccctttgttttggccaatttctcccttatggaatgactgtatttacccaatgcttgtatccccccccccattatatcagggaagtaactaacttgcttttaattgtacaggctcataggcagaagggacttgccttgtttcagataagacattgaattgtggacttttgagttgatgctgaaatgagttaagactttgggccgggcgtggtggctcatgctagtaatcccagcactttgggaggccgagacgggtggatcacgaggccaggagattgagaccatcctggctaacacagtgaaaccccatctctactaaaaatacaaaaaaattagccggatgtggtggcgggcacctgtagtcccagctactcaggaggctgcggcaggagaatggcgtgaacccggaaggcagagcttgcagtgagccaagatcgtgccactgcactccagcctgggtgctggagcgagactccgcctcaaaaaaaaaaaaaaaaagactttgggggactgttgggaaggtatgattggttttgcaatgtaaagacattagatttggaggggccaggggtggaatgatatggttttgctgtgtccccacccaaatctcatcttgaattgtaattctcacaagtcatgggaaaaacacggtgggagatgattcagttatgggagtgggtcttccctgcgctgttctcgtgatagtgaatgaacttcagaatatataatggttgtaacaacgggaggtttcctgcacaagctctctctttgcctgccactatctatgtaaaatgtgacttgcttctccttgtcttttgccatgattgtgaggcctcctcagccacgtagaactgtaagtccattaaatctctttctcttcccagtctcaggtatgtctttatcagcagcatgagaacagactaataaaactagcaactgaataaaggttgaattatgcatcatatggtaggtaaataaatgtgtgcaaaaaaaacttgggctttatttcggccatgttctttatattgttgtgacttttggtgttttcacctgaaggaatatttatgaacagaagggttgttatgattatttgtatttcttttaccttactaaaaatacatattcatcttttaataaaattatccgcggaaaccttaaatgatttgtttaaatggcttattagtatatgatataaaattgacagggaagtgactataaaaggtttaaattacacaaactctgagatttaaatttctcttaggtaagcttaggaaaaacaaaactggaaatatccccattggcatacagaaccaaattctagctagggtccactccctgccccagttctgttcagatttaccccttttgaaggccttatttaagtctggccctaccctggagtctcatctcacagaactgattagaaaagatcagttttgggtgatgaatcctgttccatttttagagctggtgctcacaattttctgaaacagaaaagcagataaatgagaaatataaagtatgaattttagggtctttttaaaattattaaaaccagtgcttgcagagacattttatttagcaacttgttttccattcctgcagatctactcgttgctccccaagccacaagaagtaaatataaaaacaataaaaatttctgtaaattatattaaactcttcatttctctattcctctcatctgtttatgtttagtttttattctacacatttttttaaaaggtcaatgacagagaaacagaaaaaaatatggatcatttttctaaatactgggaattattgaacacttagtatcaacacacagggtgttattaagattaaatcctgtaatgtgctatcacagtgccctgtagcatcttattgagcttgtagtacctgaataataaacattgcattactgcatgtgtatatgttgttttctaaatgcagacttaaacgttgctttctaaatacaaaaacaaaaaacaaacaaaaaacattgttgctttctgtttcttctgtaaactttaaaaaagccagcaaagattataatactttaaggtggagattgattgtctttatttgtaccaaaagtgtttgtattgtcacaagagtgctgagtgtaatgaactctgtgctgtgcctgcttgctctaactaatgctaataatgaccccaggtggagaaacatcagcattgataggaaacttgtttataacacccattcctgtatcctttcaaaacctgcagaatcacatttcatagagtagggccaaaattaccaagtgatttataagctgttaaagctggagaggcaatgcttagttaaatggttataagcccaggcttctaattagaatcatgtgactctaagttgaggccagaatcaagtatgagggttcaagatacatttatgatagttaagtctcatctttgcactaaagggtggtcccagaacctgttctgtttgggttgcataggaacagggcagtgtggcccacgtttttcttaactgtagcagaaattgctggtgtctgtggcaggggagggcacctgaggacaggaaaggagaaacatatttttacatctgtggagcagcttattgttcctcaatctcttctgttataaaggacagaaatgggtagagtttttctgtattggtccttctacctatgagtgtggtggtagcaggtaaagatgtggtgcttacattgttaaggcatattctccagatgcagatgtaatttgtttcaaaaatctcatctgagaagaaattccagagaaagacgagaagagaaaaaatggctttttttcagctaaacatgccttggagtaagggttgtgtccactctgcctgctagaatgccatgcctttagtacttgccaaactttaattctctacttgtgcttttcctcttaaatgagtttgttgtaactacgttttaaaattcttataatagtcaaggatctcagagaaatatttctttcctatgtaccagagccttctctacattctctacatcatggcttcttatatgccatgattctcaccatgaatttataatctgcaatattaaaaatgttccctttgtggctgttgaacatgggaaggtgtggatgctcaagattcctattggggaaacgccagggttcttagtaaaaataaagaccatgtaatgttgaggttctgtctgtgttctccatcagctctatgtagagaaggattaagaaaatgcttatttaaacagggtggcatttattacccagtaagttctgaaaaaaattattaggagatacttgttctccatggtgctaaagaaagactatttaaaataactattaactattaacaattatagaacatgggaaatatctgtattttgaactttgcataaaactgatgtttctttgtagttaaattcaggctgtaatttacttttggagggccactattacaacagtgatgctgtgtcctgtgtgcatcagcacatcataaaaatttgccttagtccagttgatattagtaactcacttgattaatgaagctgacagatttcttcaatatggagttaattatttttctcttcattagtagtttctttatgcagctgatgtgcagaaaccatcacatttaatctggcagctgcccttcttatgttttctttgcctttatctgcctatggaaaatgaaagctctaatgtttgttacaggccagaaaaactggaaaaaaaagactacaggctcttccagttactccatatttgacaaaatagccttcttgggccataaatattggcatcactggtcatcttgtgttttttttgttttttttttgtttttgtttttttgagacagtttcactcttattgcccaggctggattacaatggcacaatcttggctcactgcaacctctgtttcccaggttcaagcaattcgcctgcctcagccttcccgagtagctggaattacaggcatgcgccaccatggccagctaattttgtgtttttagtagagatgggatttctctgtgttggtcaggctggtcccgaaatcctgacctcaggtgatccgcctgcctcggcctcccaaagtgctgggattacaggcatgagccaccgcaccaagatccagaaactcaggctttattccagaccttctgacacagactgcattaacaagatcttcagtttattgtagacattacaatttgagcagtaccttctaactcaatgtgacttttccatctgaaaagtttacacaactctttctgtatgatgtaaatataccactcaaaaatgtacatgttagtgttcatgtcttacttcatcatctggaaaagtatcatataaatactgatattttggatcttatgccaatctcttttctcagagttagagtatattttcacagagtagagaatatttctgtgttgaaggttattagataatttcagtcacccctataagtaagacccaattatatttactcttatttcaccttgagtgaaacttaaaattctgcccaggggcacttggtaaatatgtgtgtttgtttgtgtttttcagggagcgttgacatttagagatgtggccatagaattctctctggaggagtggcaatgtctggacaccgaacaacagaatttatatagaaatgtaatgttagataactacagaaacctggtcttcctgggtgaggataactttaatatacaattcctaatataccctatagatttcatttatttttgtaaaaattctgtgctttcagatcccgggtttttttctttttctttttctttttttttttaagtcctcaggatttgtcccctgcccctctgcccggccagccgccccgtccgggagggaggtgggggggtcagccccccgcccggccagccgcccagtccgggagggaggcggaggggggtcggccagccgccctgtccgggagggaggtgggggggccagccccccgcccggccggccgccccgtccgggaggtgaggggcgcctctgcccggccgcccctactgggaagtgaggacccctctgcctggccagccgccccgtcctggagggtgggggggggggtcagccccccgcccggccagccgccccatccaggaggtgaggggcgcttctgcccggccgcccctactgggaagtgaggagcccctctgcccggccacgaccccgtctgggaggtgtgcccagcggctcattggggatgggccatgatgacaatggcggttttgtggaatagaaaggcgggaagagtggggaaaaaattgagaaatcggatggttgccgggtctgtgtggatagaagtagacatgggagacttttcattttgttctgtactaagaaaaattcttctgccttgggatcctgttgatctgtgaccttatccccaaccctgtgctctctgaaacatgtgctgtgtccactcagggttaaatggattaagggcggtgcaagatgtgctttgttaaacagatgcttgaaggcagcatgctcgttaagagtcatcaccactccctaatcttaagtacccagggacacaaacactgtggaaggccgcagggtcctctgcctaggaaaaccagagacctttgttcacttgtttatctactgaccttccctccactattgtcctatgaccctgccaaatccccctctgcgagaaacacccaagaatgatcaataaaaaaaaaaaaaaaaaaaaaaaaaaaaaaaaaaaaaagtcctcaggatttgtccatgtagaaaagaatttcaagatgttttattttgacctgaactttccactttcctgagctgatttgtttccttcactctagattaggattaattttagaaatttagttgcaacatattgttgctcacatcttaaaatttaatcaccatcaccaatttttgaattagtacaaagtagttaaattaagaacctataaaattaaaatatttttaaatatttagaaatttcttttctttattttttttatttttttggagacagagtctcattctgtcacccaggctggagtgcagtggcacaatgtcggctcactgcaacctctgcctcctgggttcaagcgattctcctgcctcggcctcttgagtagctgggactacaggcgtgtgccaccacacctagctaattttttcgtatttttagtagagacagggtttcactatgttggccaggctggtcttgaactcctgaccttgtgatctgcctgcctcagcctcccaaagtgctggtattaaaggcatgagccaccgtgcctggtctatttagaaaatttttataaattattattttggggttaatttactagaatattccattacattctctttactgagagcattactaagttggtaattggagaatatgagcaagattcatgttatttttcataaaacaggtattgctgtctcaaagccagacctgatcacctgtctggagcaagaaaaagagccttggaatttgaagacacatgatatggtagccaaacccccaggtaggtgacagtaaatacaatacacaaaactgataagagatctatagtttaaaaaaagaaaaaaaaccagtttttaaaataatttgggaagctgttttacaaaggaaatagtttctgtttctttttatttattttgctttttatttattttttttcctctcacatagaagcatcttttgttttatcttttttaaaatctctaaaaattctttccctttggtaatcttactttacagtgagagccaaagtccatttcatggcatataatagactgcacaatctcactgcttttccattgtttctggaaacacacagatatttgaataattttgagaaactctatgttgaactatttttattttatttatttattttttttgagacggagtcttgcactatcaccagggctggagtgcagtggtgcgatctcggctcactgcaacctctgtctctcggattcatgtgattctcctgcctcagcctcctgagtagctaggattacaggcgtgcatcaccacacccagcaaattaaactattttttaagttatctttttgcattatgtctgaaatgtgtgagaatagtggtttctgtttcatttatttattgctaatttttctgcatattccatgccgttttattactatagttttgaaatatagtttgaaattatacagtatgatgtcctcctgcttttttttttttctttcaggattgctttggctattcaaagtttattgtagtttcatgtaaattttggaattgtattttctattaccttaaataactggaattctgatgggagtttattgaatctagagacaccttagataacaaggcattttagcctgggcatggtggctcacacctgtaatcccagcactttgggaggctgaggcaggtggatcatgaggtcaggaattccagaccagcctggccaacatagtgaaaccctgtctctactaaaaatacaaaaaattagccggacgtggtggcaggcacctgtaatcccagctacttgggaggctgagacaggagaattgcttgaatctgggaaatggaggttgcagtgagccaagactgtgccactgcactccatccagggcaagagagtgagactctgtcaaaaaaataaaaattaaaaataaggcactgcaacaatatttattctttccattaatagacataaaatatttttaaatttatttgtgtcttctctaatttttttaattgatatatctttcatttaaaatattttttagttccttggttaaatttgttctcagaaatttattttagtgctattgtaaataaggttactttctttctatattttatcagatagtttaagtgtatggaaccataacgtatagttgtatgttaattttctatttgctaatgtattgagtataattattactttaatcaggttttaatgtactgtttatggttttttatatataaagtcaaatgctccagaaccagcagcttcttacttgtcttcaatgtcagtgactttaaaaatttattttgactaatttttctgccacgtaccttcagtgctatgtttaagtagaagcattgagaatgggcacaatatagttttgctttgttctctgtgaattttaagaagcaaacacctcttcaggtttttataaactggcttcaagatgtaaagatattcttttgttgggtgcccagggtgatagaatgccctctgggcttatagtggagaggggttgtagcttggtaacaaggctgctgggtcttcactggggtccaactttagttgacttgttacaaggggcttgggtagttataattcccattatatttttgggcagagtgaatatcctttaggactttgctctgtagggtagacactagggcaggtttctgcaattggttgtgcatatatggtgggctttatatcaaaatgtagatgaaaatggctttcacggccgggcgcggtggctcacgcctgtaatcccagcactttgggaggccgaggcgggcggatcacgaggtcaggagatcgagaccatcccggctaaaacggtgaaaccccgtctctactaaaaatacaaaaaattagccgggcgtggtggcgggcgcctgtagtcccagctacttgggaggctgaggcaggagaatggcgtgaacccgggaggcggagcttgcagtgagccgagatcccgccactgcactccagcctgggcgacagagcgagactccgtctcaaaaaaaaaaaaaaaaaaaaagaaaatggctttcactgggtaccagaaaggatttccccaggtctctgtgtgggtttccatgtaggtagagctgaccatgaactgtggctcaaagagctggaactgagtcatgcaagtgcttcggggaagacaataaggaccaaggtctgcagtcttgtctgtgtggctataaatgagtgtctttctccaggcctctgaaaaggcaggacctcttccagactttggctgggaagagttttggatggtttcagagtaagttcaaaattctcagtgggaccaagttgggtggataattttctggtctgtagccaagaacaggggtcctgttgtttgccacctgaatgaaagcctgccttctaaaaaggatgctcctcaatcttgggcattagcagagtttcacaacttccttcctgaatctcagagctctcttaaaggcacttattttggagatggggtcttgttacataacccagactagtcttgaaatctttgcctgaagcaattcttcagccttaatgtaccatgtagctgtcattacaggtttgagccatgatgcctgtttctctcataaaggcattttttttcagggattgctgacagattttcttgctgtaggaaaataagcaaatagggcaccttttatttttccatcttactgatgtcactctccctgtacatttttactttctatttcaattttgtgtgtaattttagattgaaacatttagggaaatatactagaattgacatgttatgtctgaagtaaattagataattagtaggcaggcaggcaaaaagaaatagacaggcaaaatggaattataggattttcacccatgtttgtcagcctatgtctaaaaaataacatgatttattctcaaatatttggtttatatatcagagatcctaactatattctgcaaaaaatatatttttttttctttatttagcattgtaaagctattctttgcttctaagcttggattacagcagtttcattttgtgtataaatagcatatatttaaaacttaaaaattatttttagtttcttttaaatgtttatcaaaagtttttcatagaatcttctatttataattatactgcattttatctgaaattttactaccatatagtggatgccagtgattcaaaatacctttcctccatgagtacagtttcagtctaatattgcattatctagacaaactctttttttgtttttattttttgtttttttctgagatggagtcttgctctgtttcccaggctggagtgcagtggcacgatctcggctccctgcaacatccacctcctgaattcaagcaattctcctgtctcagcctcccgagtaactgggactacaggcacctgccaccatgcctggctaatttttgtatttttagtagagacagggtttcaccttgttggtcaggctggtctcgaactcctgacctcaggtgctccacacacctcagcctcccaaagtgctgggattacagacgtgagccactgtgctcagctgacaaattctttttaatgctacatcaacgttgcataccagattttatgagtaagcatttctgttattattgttttgcagttccatatcagtgtgttttttcggtgtgggtttcctaatatcagtttattgtgtttgctggttttacagttttaggcggtttgcaactctgtttgtacatataagtcaatgtgggatataattaagagataaatcagccatatgtttatcacaatcagattatgtgtgtgtgtgtgtgtgtatgtgtgtatctataaatatgacccctactttggttatggcacatcttatatatttttttttctcagcagattttccatggtgtttttttcttgtgtaagtgagtagtcatgaaagtagttttattttcaccttgtgtttaataataaatatttcctttgagaaaaacacttttgtgacttgaaggtcatatttgaaaaaatttataattttgtatcttttaatttattctttttaaaaaatagattggttgtggtggctcgtgactgtaatcccagcactttgggaggccaaggtgggcagatcacttgaggtcaggagtatgagaccagcctggccaacatggtgagaccccatctctactgaaaacacaaaaaattagccgagtgtagtggcgtgcacctgtaatcccagctacttgggaggctgagacaggagaattgctttaacccaggaggcagaggttgcagtgagccaaagtagcgccactgcactccagcctgggcaaagcaagactcggtcttaaaaaaaaaaaaaaaaagatgtaaaaacatataacctaaaatttaccatcttaaaactatttaaggccgggcgtggtggctcacgtctgtaatcccagcactttgggaggccgaggcaggctgatcacaaggtcaggagttcaagaccagcctcaccaatatggtgaaaccccatctctactaaaaatacaaaaattggccaggcatggtggccagtgcctgtagttccacctacaggggaggctgaggcaggagaatcgcttcaacccaggaggcagaggttgcagtgagcctagattttgccactacactctagcctgggtgacagagcgagattctgtctcaaaaaaaaactaagtattcatttcatggccagtcatggtggtgtttcacatctgtaatccctggatattaggaggctaaggcaaaaggatcgcttgagccccaaaatttgagaccagcccaagcaatatatggagaccccatctttccaaaaaaaaatttaggctagatgtggtggctcacgcctgtaatcccaacactttgggacgccgaggtgggtggatcatgaggttaggaaatcgagaccatcctggctaacacggtgaaaccccgtctatactaaaaatacaaaaaaattagccgggtgtggtggcgggcacctgtactcccagctacttgggaggctgaggcaggggaatcacttgaacccaggaggcagaggttgtagggaggtgagatcacgccactgcactccaacgtgggtgacagaatgagactccgtctcaaaaaaaaaaaaacaattttaaaataaacagacatggtgttgtgcacctgttatcccagctacttgggagattaaggggtaaggattaattgagcctaaaagtttgacgttgcaatgagctgtaattgtgccactgcactccaccttgtaatctgtagattgcattgagcaggatagacacatttacaatattaactatttcaacctttctacaagagcacaatcaagagtgtgttaatttttatatatttgtgaatttttttagtttttttctcattatttatagtctcattccattttggtcatataaagtaatttatacaattttagttttaaaaaatttggtaagactttttttttggcctaggacgttgtctatgaaggaaaatgttctatgagctattgataaaagtgtgtatcctaaggttattgatgggtgccctctatacctttgttaggaataattgttttatactgccttcaagttgtctgttttcttactaatattctgtcttgttttatttttattacagaaagtgcaatattaaagtatacaataattatattgctctctatgtgtttcttttattctgtcgatatttgctttatatgtttagagccctaatgtgagagatatatatactcacacatacacacacagaaacaaacacacacacatacacagaaacacacgtgtatatacaaatgtttcataggttcccagtgaataaatctataattttttgaggtcctattttgtctctttagagttttgacttcaagtacattttataaaacatgatagtttttaacttaagatgtagttgcataatattattttgacctcttctgctctcatttgattaatatttgcatgaagcatctacttccatcttcccactttcagtctgtttttatcattagatctcaagtgacttgtagaaaggcaagttggatcttggtttttaaaatgtttaataaatctatttattgaaagtatgtctcttggccaggcgcggtggctcactcctgtaatcccagtactttgggaggctgaggcaggcagatcacaaggtcaggagattgagaccatcctggctaacacggagaaatcccatctctactaaaaatacaaaaacaaaaattagccgggtatggtggcgggcgcctgtagtcccagctacttgggaggctgaggtgggagaatggcgtgaacctgggaggtggagcttgcagtgagccaagatcgcgccgctgcactccagcctgggtgacagagtgagactctgtctcaaaaaaaaaaaaaaaaaaaaagtttatctctcaatttgaaagttaattatatatatttttaaataattttatgaaagagaaagacttactgttattttattattttgattcttgcatttttgtccctcattttctctttttgtctttctttgtgtctttttgatttttgtattgatatggttttactaatttcttattctctttgtgtatctatacagatattttctttgtggtaccttggggattacataaaacctcttaaaaaaaacaagagtagccaggcgtggtggctcacgcctataatcctagcactttgggaggccgaggcagatggatcatgaggtcaggagatcgaggccatcctggctaacacggtgaaaccctgtctctactaaaaacacaaaaaattagccgggcgtggtggcaggcacctgtagccccagctactcaggagtctgaggcaggagaatggtgtgaaccccgggaggcggagcttgcagtgagccgaaatagtgccactgcactccagcctgggggacagagcgagactccgtctcaaaaaagaaaaaaaaaaacaatatatttttggtttggtaaaaaattaacttcaactgaataaaaaattcttccttattacatctgccttgaaatttgtcattgatgttgctaccatctttttatgttgtatatttattaacaaatgtttataataattgctatgcttttatctttcaaattttagagaataatttaaaatgttttctgcaccattatgataatgctacaaaaatcctttttttatgtatgtgcatatttttctcagaacataatttgtttttgtttgattatatggtattttcttgaatccttttattttccgtttcaggaactgctttcagcatcttttatatgtttgtgaagttttataagtatatgcagtgccaatatactttttcagaatttggctattttggaacatcattttttcatttttcaggacagatttgctgatggtgttactctcacttgaaagctattttttttcccaggactttgactgcatcacacagtttctttccggcctacaaaatttttgttgacaattcactggttatatcgtaagactatgtttgtatatgacacatcacttttatcttgtagctcccaagatgctctgtgacttttgaaattgtgcttatatatgtatttgttataaatattttgtatgtattctagtttgtttgttaagcttcttcatgtttacattatttttcttactgagggatttttcaggtattatttcttcttgtattttttacccccataatttctattttttaattttttcaatatttttgttcttatcttcatttctgattttctgtagtctgtgttcctgtttcactcattgaatattcaattttttatcaatttttaaaattaatgtgtacatcttttctatggtttccttctgaaaattttataatatttttgatggaattatattgccctgttttgtatatattgtaatctttaattgagatttggacattaaaaaaatctacctgtcacaatctttataatgtagttctgtcctgacatagtctaaaagcaatcgttttggctagacattctgggagtctctcacacatgttcttaaaatgtgtcttgtctaaaattttgtgtttgcttttagttaaaggagtttgtgtttcttcttaaaaatcagtaggccagttgtggtggctcatgtctgtaatcccagcactttgagaggctgaggtggacatatcacaaggtcaagagatcgagaccatcctagtcaacatggtgaaatcccatctctactaaaaatacaaaaaattagctgggcgtggtggcatgtgcctgtagtcccacctacttgggaggctgagtcaggagaatcgcctgaacctgggaggcagaggtttcagtgagctgagattgcaccaccgcactccagcctgggtgacagagcaagactcttgtctcaaaaaaaaaaaaaaaattagtaatcacttgctacatttgttctctgtctgtgataccacagtctctctgatgctgtaaaacttatttttttgtctcagcaggctcaaattgtcattttaaagtatgccaccatttctttcagaactttttgtcataagagatagaaaccagtgtctagaaaagcccctataaaccagaaataaagatgtatgtgccagtattttaacttgtcttttaaaaaggaaaccaagagttggtaatttacttgtaaagtcactatgttacaatggaggggaggaagagctgtgttgggtaaaatgtaacagactttcttttttcctctatatagctctttgcattgtgttcacctggggcactgtacacactcaacttacttttttacaaatgtactttggatttttgttacatttatatgtttatgaagaaattagggcctgtggtattttgctatgctatcttgttatgtagtttgtataactttataggttaggtttataaactatactcagtctagtacatgcagtaatttgttatttttatttctttcagttatatgttctcatattgcccaagacctttggccagagcaaggcataaaagattatttccaagaagtcatactgagacaatataaaaaatgtagacatgagaatttactgttaagaaaaggctgtaaaaatgtggatgagtttaagatgcacaaaaaaggttataatagacataaccagtgtttgacaacttcccatagcaaaatatttcagtgtgacaaatatgtgaaagtctttcataaattttcaaattcaaacagacataagataagacatacttcgaagaaacctttcaaatgtaaagaatgtggaaaattattttgcattctttcacacttagctcaacataaaaaaattcatactggagagaaatcctacaaatgtgaagaatatggcaaagcctttaatgagtcctcaaactgtactacacataaaagaattactgagaaaaaaccttacaaatgtaaagaatgtggcaaagcctttaactggttttcacattttactacacataagagaattcatactggagaaaaaccctaccaatgtgagaaatgtggcaaattttttaaccaatccacaaaccttactacacataaaagaattcatactggagagaaaccctataaatgtgaagaatgtggcaaagcctttaaccagtcctcaaaccttactgaacataagaaaattcatactaaagagcaaccatacaaatgcgaaaaatgtggcaaagcttttaagtggtcctcaacccttacaaaacataaaagaattcataatggagaaaaaccctacaaatgtgaagaatgtggcaaagcttttaaccgatcctcaacccttaatagacataagataactcatactggagggaaaccctacaaatataaagaatgtggtaaagcttttaaccaatcctcaactcttactatacataagataattcatactgtagagaaattttacaaatgtgaagaatgtggcaaagcctttagccgtatctcacaccttactacacataagagaattcatactggagagaaaccctacaaatgtgaagaatgtggcagagctttcaaccagtcctcaacccttactacacataaaagaattcatactggagagaaaccctatgaatgtgaagaatgtggcaaagcttttaaccggtcctcaaccctcactacacataagataattcattctggggaaaaaatctacaaatgtaaagaatgtggtaaagcctttaggcggttctcacaccttactaggcataagacaattcatacataaaattgtaaagactgtggcaaagcttttaaacaatctttataccttactacacataagataattcatactgaagagaaaccctacaaatgtgaagaatgtggcaaagcttttaaccagtcctcaaatcttactaaacataaggtaattcatactggagaaaaacctacaaatgtgaagaatgtggcaaagtcttcaaccaatcttcacaccttactacacataagataattcatactggagagaaaccctacaagtgtgaagaatgtgacaaagcctttaacaaatccttaattcttaacagacatgattcataccagagagaaactctacaaacctgaaagttttaacagtgcttttgacaacacctcaaacttttccagatgtcaaagaaatgctggtgagaaattctagaaatatgaagaatgtgacaaagccattaaattgttgtcacatttaattgtaggtaaggtgattcatactggagaaaacttctacaagtgtaaacaaagtggcaaaacttttaaccaatgctcacactttattgcacaggacatttatacttgagaataaatatacaagtgtaaagaaagtgaaaaccctattaatatctgctcacatcaactcaacatcagagttcatacttaataaaatcattaaaagtgcaattactgtccaaagattttttcagaaaatataagcctttaaacttcagaagatgatttattttgaagacaaacattgaaatgtagagagttatagtaactttacttgtatcacaatcttattctactcattttgtactagaggcaaaccctgaagccattgctcaaattttgttcgacatcagacagataatttgtattaatgaaaaactctccaaataaaatagatttggagaaaacatttttttcaaaaactacagcttaggaaacttcagagagtttatactaaaatatatttttgtggatgcaataaatagaaaaaaaaatttaatccaaaattaagtttaggtaaggccaggcacagtggctcacacctgtaatcccagtaccttgggatgccaaggcttgcatttctgtaataataattgacattgataatttcttaatgtatctgttggtcatatgtatgtattttcttgaaaaatatttatgcctcttgctcatttgtaacagttatttgttgtttgttgtgtagtcatttaagtttctgatgtatttttgatattaaccccttgacacatgtatgatttacaaatattttgttccaatttttagttgacttgttgattgtgtcagattctgtgcaacagcattttaatttgtagtaatctgactcatttgtttttccttttcttccctgggatttcgaggttaaatttaaaaagtcactgcccaaccaatgttatggggcttttactctattttttgtagtagtttccagttttcaggccttacatttaagtgatttattttgagtggccaggcacggtgcctcagcctgtaaagactgtaatcccagcactttgggaggccaaggcaggcagattaccttaggtcaggagctcaagaccagccttgccaacatgacgaaaccccgtctctgctaaaaatacaaaaattaactgggcatggtgacacccacctgtaatcccagctactcaggaggttgaggcaggagaatcacatgaacctgggaggcagaggttggagttagctgagaaggcaccactgcagtccagcctgggcgacagagtgagactctgtctcaaataataataataataatttattatgagttggtttttatatatgacgtgagatgatagtctgattttattactctacttgtggctataacattttctcaacaccatttattgaagatactgtcctgtctctaagaaatagtcacctttatttaaaatcagttagctgtaagtagatggatatatttctggtctttttttttttttcctgctccattgccctatgtgtctgtttttattcaagtaccatactgtttttgttactatagctttatagtatatttcaaagtcaggttgcatgatatctttacttttttttttttttttttttttttttttttttgctttatttggctattcagggtcttttgtattaccatataaattgtagatgtatttttaaaaatatttattatgtcactgggattttcattgagattgaattatatctgtagatctttttctgtaatacaaatatttaacagtattaatgccaattcaggaataagaaatgttttttattcatgtattaatttctttctttttttttttttttttttgagacagagtctcgctctgtcgcccaggctggagtgcagtggcgcgatctcggctcactgcaagctccgcctcctgggttcacgccattctcctgcctcagcctcccgagtagctgggactacaggcgcccgccaccacgcccggctaattttttgtatttttagtagagacggggtttcaccgtgttagccaggatggtctcgatctcctgacctcgtgatccgcccacctcggcctcccaaagtgctgggattacaggcgtgagccaccgcgcccggctattcatgtattaatttcttactttaatgttctttagagtataatgtaaggtgtttcaaatttttggttaaatttatttcaaagtatagttatagttattgagatggaattgttttttaattcattctgagatagttgtcagtgaatagaaattctgacttttggatgttgcttttgtattctgcaagtttaataaatttgtttattctaataggttttagtaaagtcttaggcttttcttatgattatgcatagagataaaatattatataggaataatttaactttttcttctcaactggatgcttttgattgtattcttcaatatgtctttcttggacatttagtactatgtttagtaagactgaagaaatggcacattgttgacttgttttagatcttagagtaaaatcttacatttccttgtttagtatgtaattagctctgcattttttgttatatgtgacatttattggcttgaggtgcctttttcctatacctaaatttttcagagatttatcatgaggaaatgttgaattttgtcaagcttttattctgcatctatttaatgttaaaaatgtaaaatcacaatgaattctacataaattgaaaagttttcaaagactattatgaacatctctatgtatgcaaactaaaaaatttagagaaaactgataaagttttaactatacacaactttctaagattgaaccagtaagaaccagaagtcttaaccagagcaaaaatgtataaaatatataatgatattgaataagtaataaaaaagtatcaataataaaaagccttgtgtgatataaactcacagccagattttaccatatatacaatgatgagttggtactaagcctactaaatgtattccaaaatatcaagatgggattctgccctaacttgttatataaaatcagtatcgtcttgataccaaaatatagtgaagacataaaaaagaaaactacaagccagtatttttataaacattgaaacaaagttattcatgaaataatagtcaactgagtttataagtaaatccaaaagttattttgccacaatcatgtgagcttcattccatgtaaggatgttttttcacatgtaagtcattaagtgttcttcaccatgtaaagataagccaaaaattatatgattaacacaatagatgcagaaaaaacattcaagaaaatttaatattgattcatgaaaatattctcaacaaactaaacattgatgaaacatacctcaaaataataaaagccatccatcacaaatcttcagcacacatcatactgaacaagcaaaatctggatgtattctccataaaaataaacataagacaagaatttccactctaagtagttctattaaacataattctgaaagctctaggctgggcatggtggcctttgcctgtaatcccagcactttgggaggccaaggtgggcagatcacctgaggtcaggagttcaataccaggctggccaacgtggtgaaaccctgtctctattaaaaatacaaaaattagccgggtgtgttggtgcatgcctgtagtcccaggtattcgagactgagaaggggaaatgcttgaacctgggaggtggaggttgcagtgagcggacatcacccaactgcactccagtcggggtgacaaagcaagtaaaattcatagggaagaataagaaaacccaaatagccaaggcaactttagacattaaaaaaagagagaaagaaaccctgaaggcttcccattacctgactttaaactgtactacaagctactgtaacgagtgtaacatgattctggtacaaaaatacacatatagaccaatggaaaagagagagccctgaaataaagcaatacttttacaaccaacttattttttacaaagtcaacagaaatacaggagaaataactcctattcaataaatggtagtactgggaaaactagttagtcgtgcagaaaaaaagtagacccctgtctcttcccacataaaaaatataactcaagatggattaaagacttacctgtgagtcttcgagctacaaaaattctagaagaacacgtagaaagtactcatttagacactggcctctggtaaaaatttgtgaataacaccttaaaagtgagtgcaaataaaaatcaaaaggctgtgtatggtggcgcatgcttgtaatcctagtgctttgggaggccaaggcaggtggatcacctgaggtcaggagtttgagaccagcctggctcacacagtgaaatcctgtctctactaaaaatacaaaaaattagccaggcatggtggctcgtgcctgtaatcccagctactcaggaggctgaggcaggagaatcacttgaaccagggaggcagaggttgtggtgagctgagattgcaccactgcactccagcctgggcgacagagcaagactccgtctcaaaaaattaaaataaaaataaaaaatggcatctaattaaagaacttcggcacagcaaaagtaactaaacaaagtaagcagacaccctacgttatgaagtaaaatacttgcaaactgcatacaacaaaaaatatatagaatttattttaaaattaatttaaaaacagacaaatgatatgactagatacttctcaaaggaagacgtgtttccagtaaacatgccaaaaatgttcaacactcctaatcatcttagagatgtaaatcaaaacgaaaatgtgataccatttcacaccagttagaatagctgttattaaaagtcagaaaataacagatttgaagttgtggagaaatgtattatgaagaaaatttatcttcataaattgttggtgggaatgcaataaaatttagccactgtggaaagtagtttggagatttctcaaagaactataaatagaattgccatttgacccatcagccccattattcccaaaaagaataaattttctttgccaaaaagccacctgcactcacttgtttattctagcatgattcacaatagcaaagacatagaattaaaccaggtacctataaaccttagattggatgaggaaaatgaggtccttatataccatgcgatactatgcagccacagaaatgaagtaatgtcctttgcagcaacatgaatgcagcagatggccattaagcaaattaacacagatcagtaaaacaaataccacatgttctcacttacatgtggaaggtgaacattggatgcgtgtggaaacacagataaaatcaataaacactgggaattctaaaaagatggaagaagaaatggagacaagcattgacaaactactttccagtgtgttgtacactacttgggcgatgggattattaagtatccaaacctcaacaccatgcagtatacctatgctacaaatctgcacatgttctccctgaatctaaaatagaaataagatgttttgtggtataatgacatattatgtatctttagctccaagttaatggttggaattagcagtgtaagacagaagtatttacctcttaaggcataggggtaaatgtttttataccaggtctcctacatgttgtaagctatcctctctgaaagctcttggtctatagcccaagaagtgttttattcccaagtgtgcagctgaaataaatgactgtatccttttttaatgtattaactgtagacaagaatatatagttagttactctttttggggataagtggtatgtggtttaatcacttttatttttagaatgaatcatttttttttaatgtgaggttgtggaaaatcatgttaaattactgaataaggaaaatgaaacatttttcttaagcataaaagtcttatggccaaaccccaagaatgatgaaacagagagtgtggattaagaccacactgctgcaacaattctatcacaatcattctggtaaaaacaaaataatgggtcagaaggaatttttagaatacttttttgattctatcacagtgttaaatttttatttgtctttattatttgctatatagaagtctgtacttcagcaaaagatgccatgaatttctagttaatgtgctcacacatattctccctagaaaggtactgctgtgtttacaataaatgtggagcattgattatcttccttgtgctgctatgtttgtataaaaaaagacttcaagtctgactttgcaagtaaagcagagtcaaccctgacttttctagtttcaacagccacagcctctgaaatttagtataatgtcaactatgaataatgacagcatttcaaaactgagaaaaagaaattgataactttatatttttagtttatcatttagtttataaaaatttatagtttctaaattatatgttaaataacttgaacatgcagatacctaaaagattcatttagatgatagtattaatatttaatagcttataattgtgtatcacatttgctgctttgggcttcctggaaagcagttatttagtttctaaatgtaaatggagaaaaggctttctataatcctaatcatacagttcttttaagattagcactatgtttagatttgaataaaattcataggtttgtaagtaaggtaaatgttaatagtttttttctaaaaccaacattttaagtgactgatcagtaatttcaatctatttcattttattaactgagaagccaaattatttaagcaaaataagtattcttatattactctttctagaactttcagaaactaactcaatggatgataatgtacatagagaccacaaatattctatataataataggctcattcttgctctctttctttgcccaggctgttgtgcagtggcacaatctcggctcactgcaacctccgcctcctgggttcaggtgattctcctgcctcagcctcccaagtagctggaactacaggcgcatgccaccacacccagctagttttttttttttttgtatttttaataaggatggggtttcaccatgttgatcaggctgatcttgaactcctgacttcgtgatctgccccccttggcctcccaaagtgctgggattacaggcgttagccaccacgcccggcccattctagattttaatataaaaaatatatttcaaaagtaaaattggtgtctgctcttttaagccatgagaggaacaccattgttagaatctatttaccaaagtgcattaggcttagtaataagtgctttacgccaaaaatcaagttctacctactatctaagggtaaagagaagtagttttaaaattcctatgtatttctactaccctaaaaaattaaaagccaaaatgttaggaataaaaagcattgcatgaaatggtgttaagcataaagattaaaactgaaactcaatattaggtggtgctgtagcaggacaagctgtagacaaacccctctgacactgagttaaagaaggaagggctttattcgtctgggagctttggcaagactcacatctccaacaacagggctccctgagtgagcaattcgtgccccttttaagggcttacaactctaaggggatccgcatgagagggtcatgatcaattgagcaagcagggggtacatgactaggggctgcatgcactggtaatcagaacggaatagaacaggacagggattttcacaatgcttttccatacaatgtctggaatctatagctaacataactggttaggtcatgggtcaatctttaaccaggcccagggtgcggcgctgggctgtctgcctgtggatttcatttctgccttttagtttttacttcttctttctttggaggcagaaattgggcataaaacaatatgaggggtggtctcctcccttattccccccctttgagaatctcactcaatagtgggggttctcagttttattcttattacccatgtcttcttgcaagacagattgatagtgattcatatagtacacttgtgctgaagcattttgatgaactaaggtagtgataaagctttctatcatttgaagaagtacaggtagcaaacaaaggagcagtaagcaggtttccattactattataactcctattataacagttttaaatctttttagcactggcaaccactttccaaacatggccccaggattaaatccatgccacacttgcacaggcacatgtgccagttttgtcatatttctatgtcttcaactacttgcccttgatcatctatgtgaagacagcaattagtaaggttaaattttctactgaccccctccttcagctgctagcaagtagttgagagccaatctattttgatagatagcatttctcatcgagtttcttgccaggccagaatagtcaaggctttgctggtcttattagtgattatttttaagacagcttttaaccatatgatttggttgagcatgtaaatggaggtctggtatccccacgagccgtcttgtggccaagtagcaggcccataatattgtatgattctctcagggggccattcattatctttcctattttctatagctatgattctcttttcgcgggaagcatagacagggaagcccaggagttcacctgtctttatgggcagtaggaagaaagatggtttaatagtgccaataacacaactacctgcccactggtcaggtaatttggcataaggtctatgcccacatatccagtataatccagtgggtccagtcctggtgggactccgggtgggtctacacagtttgcaactttgggaatttactaaatggatttttcttaatatggtttgaactatattaggtggctgtttttgtagtactattatacagtttttgcccaaggcagctgagtcttcccacaggatgggtgaagtccttcccaactcttgctatacagtattgtctaatgattgaggcttttaggacccagaagttaccagggtgattcttttgagccaggaatttatcaggaactgggtctgtgggtactaattctcgggcttcccatggccattgatctcctgttatagttcctccacatacataacatgaagtgacattgagagactgggctacatgcttggctaattgcaaaaacaaatttcttgtttttcctggaatttctggtactggcacattcagttcgtcatagaaggtttgaaatactggctcaggagagcatttataaactcctcaaaccatgatatttatttgaggatccaattcagcttcgtcgatttctagggttacacattccccttttttccagtgaggattaagggggttggttattactagttctaaggggttacagtgaccactggtagaggaagggcactttatcctttctgaagctggacaggattcttttcattttttatccaagtagcctaaatgacacaagatcagtatccacattcatttccacacagtcctaattcatggcaaatgtacttattttctgccatatagcctcttctttaaattaagagaaccatatcctcttcctaacataactattagtgacagcacaggcatcatatttcaaggtgacttgtttgggcacccctttttcttctgttttggctaacactttacttgtatcgtttatgagcccccaccagtcctcagtccttaatcttattttaaaaactgtggtcggctgggtgcagtggctcacacttgtaatcccagcactttgagaggccaaggagggcggatcacaaggtcaggagatctagaccatcctgctaacagggtaaaaccccatttctactaaaaatacgaaataattagccgggcgtggtggtgggtgcctgtagtcccagctactcgggaggctgaggcaggagaatggtgtgaacccaggaggtggagcttgcagagagccgagatcatgccactgcactccagcctgggcagcagagcgagactccatctcaaaaacaaaaacaaaaacaaaacaaacaaaaaacaaaaaaactggtcatggaagtctcagatgggtcataacacacatcaggttagtcatttcctgggctacataccttgtatagaataacattatacaaataagttctttttagagttccagtacacttataataaccacaaaataataggaccgtagcaatcttttgtcctacctcagtgacttgaagtatacactgggaacagtcctcagtatgaggaaggtcagttgaagtccttactgtaaaagtccaaattttaaggaaaatgagtcctacaatgagttttctcatgcttcggccatgcgtggaccagtcagcttccaggtgtgactggagcaggtcttgtcgtcttcttcagagtcactttgcaggggttggagaagctgctcccgtccacgtacagctcccagtcaactaatgttcaaggatagtctcagaggttgggcctgctagaataaactgagtccaacacctctacacagttatgttcaactgcactctctgataccgggagcaaggtggcggggtttagggtgttgcaaacttcaatggttatgcgggaattttcacagagcaagctttggtacttggttaatctaacatttgttaaccaatgatgtcctttggcagtcattaaagttaccacagcttgggggggcctttatatttaggttttgcccaagggttagttaatctgcttcttgtgctaacagggccgttgctgccagagcccttagacatggggaccagcctttggaaaccccatctagttgttttgagagataggccactggccttggccagggccccacagtctgggttaaaactccaactgccatttttttctctttctgacacataaggtataaagggttttgtcatgtcaggttgccccagggctggggccaacatgagtttttcttttaactcatgaaaagcttgttgctattggctgtaatagatgtagtttattcaatctacatttttattaactgccacccaccaaaatattgactcatatgctgcagctatttgtttttaagctttaaattgatctgatattccccgtgggactccaattgcatttaatgaacgtgagagtcgatagatccataaggggcttctctcgctttacaatgtcttatttttcctccttctggttgatgaaatgccagggtgaaagggatagccaactggactaaagtataagtgccactccagttattcggcagaatgcccggtaaaggtctaccacaataccaccacacatccactcagggatgaacaagggctgactgattgataagctcttgaaaattcttaagctcactgcatctcttcgggtctccaaggaatgctaagtttcctccctgtcatgagagacacaaagtgaacttaatgttgggagacagaagctggatggcccttgggtgtgacccgaagggtactggacttcaggatatagcagagagagagcttggcatgacttgttacttcaggctgtagaatcctggaaaacagctacaatggagcccacgcctagtcgactggaggaccaccctagtggaaaggggacaatctgggcctctggcctgccatgcacacaagcataacaattgcttttgtttaacgtgcggatggaatatttgatctattccaaccagacatttgcatcttggtatcctgtcttaattgccaaagtttgttttaagtctttaaaacaagatgatcctctggtaaaatgatcctctataaggaacatagtaaaatgaatctatgattttaggaagttataaaaatcagttagggcagtccatccttgctctttagtggtccaaagaacgttggaccaactatggcataaaagttctacattggagggcaagactcctggttgacaatggagtctttatcaaaatttccccagattaaattgtcctaatttactaatgcccagactgaggagagtcaggagggacagaggtacttttctgaagtacagacctgtctttgacttggcaagtccccacagggtataacaaggtaaacattaaatgcaatagtttgaggcaaaattgacttggttatgttaataactagatggtcagcaatagagtgaggaaagaagaaagagtaatagaacagatgaaagagttaaatttttctaagctttagtttggtagggtattcccctgggactatggcccatgactctggagggggtggtgctttcttgacttgggtgtgatgagtccatcatttttacactgtatgaacagcagtcttggtggttagcaacacaaggtagggtccttcctaggctggctcgagtttccttttttttttttttttcaccttttgatgagaatgtgatcttcaggctggtgctagtttaccagaaattctaggggtggtacatgtgctaaaagagttttagttttgagggaaagtggaagataaatcaagtatataatttttaagaaattgaccttttgttttaaatgtggggacatcagcagtggactttatagtccttggtgcctttctactgagaaatttcctttagcacccatttttttaattagtttttagaccaaagaagccaaacaccattttatatttgacaatgcttcctgcatgatttttataccagataagctaaatgtcacctttatattagtgtgccattaatgttaaacttagttttaataaaactttgtagacatatttattcaatttttaatgtcagaccataaagtaagatttttatagactctttttaaccttttataatttttgttgaagagtaggttagtgctttaagaaaaactcattgtgtttatactttaatttcctgttcacagaaaaactggatgacacccctttaactttagctgatgtttacacacagaattttctttacaattaacgtttcaaaacttgcttaaaccttcaaaacaaattttaaccttttaatgtaggtaaaaatccacattcttatgcctccttataatccttttaccaaaggtatattttacctttcttatggaccttgcacataaactgtttcttcaatagtactcaggaggccttattatttttaaattatacaacatttcttgcataattttttttttttttttggtatatattgatcattcttgggtgtttctcggagagggggatttggcagggtcataggacaatagtggagggaaggtcagcagataaacatgtgaacaaaggtctctggttttcctaggcagagggccctgccaccttccgccttccacagtgtttgtgtccctgggtagttgagattagggagtggtgatgactcgtttaaccagtatgctgccttcaagcatctgtttaacaaagcacaacttgcatcgcccttaatccatttaacccttagtggacacagcgcatgtttcagagagcagggggttgggggtaaggttatagatttttcctagtacagaacaaaatggagtctcccacgtctgcctccctctacacagacacaacaacaatccgatctctccctcttttccccacacttcccccttctccattcaaccaaaccgccattgtcatcatggcccttctcaatgagctgttgggcacacctcccagatggggtggcggccaggcagaggggccccccacctcccggggcagccgggcagaggggctcctcacttcccagatggggctgccgggcagaggggccccccacctcccagacggggtggcggccgggcagaggggctccccacttcccagaccgggcggctgggcacaggcgccccccacctcctgggtggggtggctggccgggcggggactgccccccacctcccggacggggcggctgccggtcggagtcactcctcacttcccagacggggcagctgctggtcggaggggctcctcacttctcagaaggggcggccggtcagaaacgctcctcaccttcaagatggggtggcggcagggcagagacactcctcagttcccagacagggtcatggccgggcagaggctctcttcacatctcagacggggcggcggggcagaggcgctccccacatcccagatgatgggtggccaggcagagacactcctcacttcctagacggggtggtggccgggaagaggcactcctcacttcctaaacggggtggtggccgggaagaagcgctcctcacttcccggattgggcggccaggcagaggggctcctcacatcccagaccatgggcggccaggcagagacgctcctcacttcctatacagggtggcggccgggcagaggctgcaatctcagcactttgggaggccaagccaggcagctgggaggtgtaggttgtagcgatctgagatcacgccactgcactccagcctgggcaccattcagcactgagtcagcgagactccgtctgcaatcccggcacctcgggaggccgaggctggcagaccactcgcagccaggagctggagaccagcccggtcaacacggcgaaaccccgtctccaccaaaaaatatgaagaccagtcaggtgtggcagtgcgcgcctgcaatcccaggcactcggcaggctgaggcaggagaatcaggcagggaggctgcagtgagccaagatggcggcagtacagtccagcctcggcttggcatcagagggagaccgtgcaaaggggagatgaggaccatgaaaaagggagagggagagggagaaggagagggagagggagagtgcataaattttttttaacatttttctctttcacaacttttgcagacaattctttgacatgcctcaactttctgacttattacaaatatttctttctttaaacaaccagttaatttatttcaggacaataatttaccatataacattctttttacagaaattctgccccccacttttttttttcgaagatgataaccattcttttccaaagcgaacttcttttatgtctgtggactagaccatctaaggccacaagattagaagttactataatacatgttacactgttaacttttagcaaattttacttttgttgaaaaccttgtaagtttgggatttcaattatcctttgctatcaataagaccttgtttagtccaaatgaacttagaattggtatagataggtttttttttttttaattaccttggaggaatcatctatcgtcctgtcatgaagggagttcctcctaggtctggtcggaattttgtatggtaattaagatttagatcccctgttagggaacctgctgggttaagggaattttcagtggttaatgttaaatcatctttttttctttttttaggatacttctgaactggtgagatgtgctcaaaatgaggtttcctctaaaagttatttttctactttcttctgttagcaaagcagttgccactacagattgaatgcatttgggccatccacagattactaggttaaggatttttgataggaaggctacacaggttgtcagtggcctcagtgctttcaggctatgcccttgtttacactgacaacaaagtgatattggagtgttgtagggttatggagaatacctttaattatcaattataggttttaaatttaccttggcttttaaaggaatagggtacactgtttgtttttcttaacaacttgtatatctttctttctttctgtctttgattttctgtctctttttctctttgactttccttttgcctctgtctctttctctctctctgtctctctctttctctctctctctctttccttgactccctctttgtctctctgtctcttcctctttctctctcctggtctttccctgcctctgccagctgcttatgctgctgttctctcaaccactgtgggggtagggtgggggtctaaaaccagccgtgagcaagtgtctatgtacggcaactggtctgggtgccctggcttacaggttaccttgtgccatacctttgaaacaagggacctgtccaggcttccttctgatggccaacccacttctaatgctgaccagtctatttcacacaaagttctaagttttcctgctctcatagtaacactctaatctcccttaaatcctttctttaaatttttcaacatagttcctagtggggtgggcttactttgtgcctgacccatgcttttttgagacaaaacaccacgctcacaccacacacacaccacaaaacaaagaatgtgtaaaaagggcacacatacacttttacagtttacacaaaaccagaatcaaaaccaaaatcagagtatccagaaatccaagccaggtcgaaaccaaaaccaaagtatcaagcaatccaagtcaactcaaaaacaaaaaccaaagtgctggtacaggcacactgtgggtgatcagaccacacttccactcaaatggagtgggcaagttccaaaaactagtcttaccaagtttcaggtgtccagactccaagtgccagttccttcccggtgttcagccactgcgctgatcctccacaggggcatgccacacactgctctggtgaggcgttccactggagtaattgcctacctgggagtgctctcaggatccgcgtcgctcaagctggctgcagtctccaacagggatgctccacagggcaggcctaagccacctaaagggctgcctcgaccatctgttaatcactttgcttcctggttggggaaccaagaaatgtagcaggatgagccacagacaaaacccctcagacactgagttgaagaaggaagggctttattcagccaggagctttggcaagactcaagtctccaacaaccgagctccccaagtgagcaattcctgtcccttttaaggtcttacaactctaagggggtctgcgtgagagggtcatgatccattgagcaagcagggggtacatgactgggggctgcatccactggtaatcagaatggaacagaacaggacagggattttcacaatgcttttccatacaatgtctggaatctatagataacataaccggttaggtcaggggtcaacctttaaccaggcccactggcgccgggctgtctgcctgtagatttcatttctgccttttagtttttacttcttctttctttggaggcagaaattgggcataagacattatgaggggtggtctcctcccttggtgcctgattgtatctcagttctcccacttatgggctgtatgacctaagtatagtttcttgcctgtctgtgcttggccctatagtggttctgtgagaataatagtgcctacatcctaacgttttgtttaaattaaagcaattaatgcaaataaaggtgtcagaaaaatgcccagcacataacaagtgtacaggaagtttattagctcttatttgttgattctgttagatcatgacaaatgttaagcctgaaaacaagatggccataccactggtttgtaacccatgttccttctaatttgtccgtctggggctataatagtagttgaatgtttttaatactaaccttggcaaattcccatatattcacatacagcatggatataaatatctttaaaagatttatcattgagtactgctctttagcactccagtaaatggataaagaggaacttaaatggtgagtgtttgtcagttttattcattagagaatgaggcaaattgtttctttatctacttgtttaatatatttcttatttattttcatttgatacatttaaatgtagtttgaaaatatatatttaaataacttttttctctaacaaatgaagaaaatcatttatttataaatttagacagaattttactctaaactgttgctttagattttttttaaggtattagatcattaaaaatcagcatactttatttctgagtgtgggttcagactattcatgatattaaaagtttacttacatcactacatgagcaagccacatgaaataaaaaaatatgtatatgtctcctgaaattttaaaatgaacaaacactttattctctggcccaatttcttaaaatttctctctttttttttttttttttgagacatagtcttgctctgtcacccaggctggagtgcagtggcatgacctcagctcactgcaacctccacctcccagattcaagcaattctccctgcctcagcctcctgagtagctgggattacaggcgcccactaccacttccagctaatttttgtatttttagtagagatagggtttcaccatgttggctaggctggtcttgaactcctgacctcaggtgatctgcccactttggcctcccaaactgctgggattacagatatgagccaccgcacccagcctctctctcttttttttttttttgagatggaatttcactctatcacccaggctgaagtgcaatggcacaatctcagttcactgcaacctctgtctcctggattcaagtgattgtcctgactcagcctcccaagcagctgggattataggcacctgccaccacactaggctaatttttgcatttttagaagagatggggttttgccatgttggccaggctggtctccaactcctgacctcaggtaatccacctgccttgggctcccaaagtgctgggattataaacgtgagccaccacacccagccttctcttatatattttttatagtattaatagtatttttgattggcaaataagagttgtataaatttatgggttaaaatgtggttttaatatatgcatattatataatatgattaagtcaagttttataacatatctgtcaactcacttatcaatcatttcttatgatacatttgaaatttactcagttttttaaaaatatagtactttatagtttactatcatcatgctgctgtgcaatagatctcaaaacctacttaccctgtctttttgaaattttgtaccctttgatcaacaacttcctatttacttcccaccacacctaacctctcataaccattatttcattttctacttttttgagttaaactttattagattctacatataaataagatcatgcagtatttgtctttttgtgtcaggcttatttcatctagcatgatgtcttcaaaatttatctatattgttttaaatgatgggatttatccattgttatggttgactagtgttccatcgtgtatctataccaaaattttaaaaaataatttaaatatatgtatattagttaataactaatattaatttgttatttacataaatatatatttatctcttggttgaaaaactagtgtgttatgagaaaatatttctttgttaaagcatgtatcattgtaatttagcatataaatattttgttaataatagctcatttgtaccaagcactaaccataacactatatgtgttaataaatttaattctgacagtaatttaataacataagtatactaattatcattatttcacagtggaagaaagagagccactgagagaaatgactcactcacaatagcagagcccatattaaaatacaggcaactttgtcttaaagataactcttgagtacaaccataaaaatctttcaaacagataagacaaaattacttttaacaattatttttcagaaaaactaacataaattgaataattggataaattgtcattgttatacgtgtgtgtaaatgtataaaatggtacataaaatagaaataatttaagctagaaaaaagatgttaataattattatgaataaaatggtgaggtagtcaattattatttgtagatgatatctttgtttacttagataacaaaaaaactacaagactactttaaatgtctattcaggtgggtaggcaaaattttaagacgatcacctggattttcagtctgttgcacacctgctgtgtaatcttcacctctgaagtgtaaaaaacaagtgtctcactgtggtggaaaattacttatgaaattaggttactaatgtgttgactctgtgttcatcaaaagggagattaccctgattgggctaaacttaatgagaggtacttttaagagaaaaagacacatcatagaaaaatacccctgctgacctggaagtaagtgacttctaggtcaaccaatttgtaaactgcttatggtgaccccatggcaggaaatctatttgtatattgtcagaattcctgccttccacatgatgcttccagtaggaagagaaaaaggataccatgacaagttaaaaaaaaaaagggagggggctctcttttttcaagaaataatcacctctcatctgggatagcttaatataaacagaggagaccacaacatgagcacatcgatgagaggaaaaaggcaacctggttgaaagggctcactgacatgatggagcagcatttactaagtcacagtgaatgattagcctctgggatagcaatagtccgccaagaagtctacactcattcttatactgattaaatgagcatatccgtgccattctggaggcccagttttacactacatattacagaaataacatagagaccagtgggtaacctcctagaattaaacttcttgtgaaaaagcatatcttattgttttcacaattgaaaaaccttgaaaacataatgaatttatataataaatgtagtaatacagatgtttattgttgcgggaagtcagggacgccaaatggagggaccggctgaagccatgacagaagaacgtggattgtgaagattttatggacatttattagttccccaaattaatacttttgtaatttcttatgcctgtctttactgcaatctctaaacataaattgtaaagatttcatggacacttatcacttccccaatcaatacccttgtgatttcctatgcctgtctttactttaatctcttaatcctgtcagccgagaaggatgtatatagtctcaggaccctgtaataattgcgttaactacacaaattgtacagcatgtgtgtttgaggaatatgaaatgtgggcaccctgaaaaaagaacaggataacagcaattattcagggaataagagagataaccttaaactctgacgccggtgagccgggcagaacagagccatatttctcttctttcaaaagcaaatgggagaaatattgctgaattctttttctcagcatggaacgtccctgagaaagagaatgcacacccaggggtaggtctctgaactgggccccccagggcgaacctgtctcttatggtcgagattgcaggggtgaaataaactccagtctcccttagcgctcccaggcttattaggaagaggaaattcccacctaataaattttggtcaggccggttgatctcaaaaccttgcctcctgagaagatgttgtcaatgacaatggtgcccaaagcttcattagcaattttaatttcgcctcggtcctgtggtcctgtgatctcgccctgcctccacttgccttgtgttctattaccctgttaagtacttgatgtctgtcacccacacctatttcgcacactccctccccttttgaaaatccctaataaaaacttgctggctttgtggcttgtggggcatcagggatcctaccaacgtatgatgtctcccccggacacccagctttaatatttctctcttttgtactctgtccctttatttctcaagccggccgatgcttaggaaaatagaaaagaacctacgtgattattggggcaggtctcccgatagtttataataataaactgctaattttagaagattctactatattgtcatacaatattgaactttaaacaccttaatatgaatatgtcttgaatgcatgaacagctatgcaggtagtttctcttagattaacatgataaaagtaacaattagagaaaacatttagaatgggataaaatttatcaaaaccacattttttcaatggcttggcataattgtcatgcttttggaaatggctagattactaacaagaagcaaagacaaaatcatggctttgccaaatgattaaattcttgaccatttaaaatctaaaatcttgttatgccagtatagttatttgcataagtgcaataagaatctgttttgttttgcttttttgagatggaatctcactctgtcacccaggctggagtgcagtggcatgatcttggctcactgcaacctccgcctcctgggttcaagtgattctcctgcctcagcctccaaagtagctgggattacaggtgcctgccaccatgcctggctttttttattatttttagtgcagatggggtttcaccatcttggccaggctgttctcaaactcctgacctcataatccacaagcctcagcctcccaaagtgctgggattacaggcatgagccaccacacctggcctaagaatctgttttcttttgtgacattacacaactggaaaacttggttattttaccaaggctttaactggaatgttgtgctttcttttaaggaatcaaacttgacttaggaaaccaataaatcccttggaaactggcctcatattttgtgtacacagtcccagtgcagggtttctgatctgtggtaagtaaagaatgtcactttctagcaggctgggaagtccaagttatcttggaacctcaagaagagagaaattcactcaactcataagtatttgatggtacaaatccgtggctaggcttggctgtaaaaaggtcttatctcagattccttctacaaaacaaagttccatcaaagccaatttagaagacctatgtaacaaataattattcttgctgcaccgtatgcaaataattaagataactataataaagcaaacccatcctaccatgattagtcttctaataaaaatgggaaactggagagagaaaattgtttcaaaaactacagcatgcctgttgttatattctagtcttgcctaacgttttttatttttattattttatttattttatttttattattttctaccgtttaaattaaattctaatttttctgactacaatttccaaaataagctgtgttttcttaaagccctatgaatggaaaactaaatgtttcagcaggcgctgcctctgagcccccatatcatcacaggaggaaatctcttcactgttagtactgacaactaataactgagtgtgcccagaatccttctccaccacatctagtgagtccatggaacccagggtaattcagagagtatctgttataggaatcaactcctggatacatcacacataagtcaaagcctggaaagatgaggaagcaacccctgatagcccaaaggaatgtcctaaatatcaatataaagaaataggaaatcttaagctgaaaatagtaaaaaataagtaactgagtgagaactactcatcttactcagtctcacccctaccttaccaaatactttttgtcattcctacctcaaatattaatgaggcagaaatttaaaaataataataagaataagtactgcatttattcactactagaaaagtaaaagctaagtctcagaatgtggcaaggcaagggttaaaaggaaaaagaaaagaacaaattttcctctgcctagcaagctcacttcaaggacagttgtaagttaatgctgtctgaatagccaaggccaaaggaatgggctccagacacccccccatgcccttccagagcaaggttgaaggaagaaaaagaaagacggattcttttactgttactcttttcccaggcttcttaagcattattatgttttacaaatgtctatatttagccaggtcttgtttttctttcaatgcagctacaaggccaccagctatgcaaggtcacaagttatgttatgctataggttacatgacctgtcactgtatgactaactgcttttgttttgcttctgtaaggccacttataaaaaccccactctgtctttgttcaatgctcagctttttggatgtgagtccactgagccagtgcgtacctaaaataaacaacaatcctcctgtactccatattggtctctctgttcctcagtttaccacaacaataaaactttttaattaaaattattattattatttttttgagacggagtttcattcttgttgcccaggctggagtgcaatagcatgatctcagcttatcacaacctccacctaccgggttccagcgattctcctgcctcagcctcctgagtaactgggattataggtgtgggccacccacccggctgattttgtatttttaatagagacggagtttctccatgttggtcaggctggtctcgaactcccgacctcaggtgagccacccacctcagcctcccaaagtgctgggattacagacatgagtcattgcacctggccatgaaaattatttactatgccaccttgtgggaattgctttacttactctactatttgcagtaggactatatgctgtagcgccttgagggtggaatattggacagagaatatcaattactgtagcattttgcttagttattatcctcacggcaggaataatggttaccaataaaaaataacacatgggccttaccaaacatgcacctctgcctctcattaggtatgcaatgttgtttctatctcaactaatctggcctagtaagagacactgctgaaaacttaaaggactaaaaagctaaggtaataccaaaacaaccaaatagattcttggtttggaaacaaaatcatagcatgggtcatcccattcctgggccctctcctaataatatgcctaggactaatgttcttatcctgcctagttaaaatttttcaaagatttgtaactgacaggatcatggccatttcacagacaattaccccaaaacatctacagatggcattactcctgcagtctatctgagacctgaaaactcttggtccccttgtcagcaagaagtagccagaaagaacatgccacccctcatcctttttataactacagggtctggattaatagagcaggagcttcaccatcttggacaagtactgccatttttcacctcaatcaataactgcctaaatccaaagggcatcagtctaatgactaaggtcagcatgaccataaaccacaaataacatctctgaccagatactctccaaacccctctataaccagaaacaagccagccctgagataacctcccccctggctggagagatgtcagccccaaaataacctcccctctgaccagagacattctaaccccgccataaacttctcccccacacagaaacatttcaaacctgtgataagctgtctcaccttgaacgcttaaataatcttagtctgtaagagaaagtgctcctgaacaaaaccagccagaagcccctctcagacctgtctttgactgttgagctgcttttcatgtttctttcctctttctttaactcttacagtgactaatataaattattaaaataggttaggaacatttttttggctctccctctccctctccctctccttctcccgacggtctccctctccctctctttccacggtctccctctgatgccaagctgaagctggactgtactgctgccatctcggctcactgcaacctccctgcctgattctcctgcctcagcctgccgagtgcctgcgattgcaggcgcgtgccgccacgcctgactggttttcgtattttttggtggagacggggtttcgtgtgttggccgggctggtttcctgctcctaaccacgagtgatctgccagcctcggcctcctgaggtgccgggattgcagacggagtcttgttcactcagtgctcaatggtgcccaggctagagtgcagtggcgtgatctcggctggctacaacctccacctcccagccgcctgccttggcctcccaaagtgccgagattgcagcctctgcctggccgccaccccgtctgggaagtgaggagcgtctctgcctggccgcccatggtctgggatgtgaggagcccctctgcctggctgcccagtctggaaagtgaggagcacctcttcccggctgccatcccatctaggaagtgaggagcgtctctgcccggctgcccatcgtctgagatgtggggagcgcctctgccctgccgccccgtctgggatgtgaggagcatctctgcccggctgccctgtgtgagaagtgaggagaccctctgcctggcaaccgccctgtctgagaagtgaggagcccctccgcccagcagctgccccgtctgagaagtgaggagcccctccacccggcagccaccccgtctgggaagtgaggagcgtctccacccggcagccaccccgtccgggagggaggtgggggggtcagccccccgcccggccagccgccccatctgggaggtgaggggcgcctctgcccggccgcccctactgggaagtggggagcccctctgcccggccaccaccccatctgggaggtgtacccaacagctcattgagaacgggccatgatgacaatggcggttttgtggaatagaaaggcgggaaaggtggggaaaagattgagaaatcggatggttgccgtgtctgtgtagaaagaggtagacatgggagacttttcattttgttctgtactaagaaaaattcttctgccttgggatgctgttgatctatgaccttacccccaaccctgtgctctctgaaacatgtgctgtgtccactcagggttaaatggattaagggcggtgcaagatgtgctttgttaaacagatgcttgaaggcagcatgctcgttaagagtcatcaccactccctaatctcaagtacccagggacacaaacactgcggaaggccgcagggtcctctgcctaggaaaaccagagacctttgttcacttgtttatctgctgactttccctccactattgtcctgtgaccctgccaaatccccctctgtgagaaacacccaagaatgatcaataaaaagaaaaaaaagaaaaaaagaactttccaactataaaaaataaataaataaataaataaaaaataaaaaaaagaactttttttgtacaacatataatcctgagaagacaatcaaaactttatgtacattttggctacctgaagggccatctaaacatttatacagaaacatttatttaactgtcactgtgttttttgtttcttgtttgagatggagtctcactttgtcacccaggctagagtgcagtggtgcaatctcagctcactgcaacctctgcatctccagttcaagtgattctcctgtctcagcttcctgagtagctgagattactagtgcatgctaccattcccagctagtttttgtatttttagtagagacagagtttcaccatctttgccaggctggtctcgactcaagttctgccaggccaaactccacccacctcagcctcccaaaatgctgggattacaggcgtgagccaccatgcctggccaattgttacttttaatgcatgtcttctgttagtataaaagctttctcatgcaagaagtttgatgttacaacaatagctaaaagaatattagaaaatatgttttcctcatggaacatttctgaaaaagtctcataggataaagatactcatttcactagacaagtcgtaaaactgttaaataaggcattaaagatacaatattattgagcaaaactaaattgactggattgcctttgtagttgcagattgatgacaatcagatctattaagagtggaaaaaatgtgttgacccttctaaaatagttactggaaagcctatgcatgtaataatagaacctcatgtatcttctgctactgaagtctattattactaaatgcagcaagtccttaatccattatgacaaagcatattttcacaaggtaaataaagctttgcttttttttttacagtctcactctggcacccagggtgcagtggcatgatctcgactaactgcatcttccacctcccaggttcagtgattctcattcctcagcctccagagtagctgggattacatacatgcaccaccactcctgtctattttttgtatttttagtagagacagggtttctccatgttggccaggctaggctggtttcaaactcctggcctccagggatccacccaccttggccaccaaaagtgcagggattatagtcatgagccactacacctggccactacttactcagggtagtaaaaccttttataatctaaaatcaagacattgagtctgcttgccatctacactgcagcaagacttggacccttgaaatttgggtttataatgtcacaactcagaagaacccctctaaactcttgcgattgtataccctttggagatcttaagggaaagctaaccagagaagtttatctttaaaaacaaatggcaactttgatatagatagctttttttacaagatcaaaaatgaagacatgtctgctattatgacactcttagttgacaaatttttttctcatggctccacaaacaacagaaatcaaaaagaaatctctcatgtgcactcatgggggtattcttttatatgtagagaattttgcagccagctttacatatgaggtttcttacccacattaagaaagaaattttaatgagacatttgctgcctcataatatcagaaacaaaatattggtctactgctcttaacctacttcataacttaaagggaacttcttcagaataggttaaagagcattgccaagggccattcgacttctgaatgggcattgtttgttaggttctccccacaccccgcatggagtagagtaaatgaggcaatgattagaaatgtattttccataataggctctataacagattttactgcaaaggctatggttatacaatagactttaaattttcttactaaagttttgctaaataatagaatttctctaaattactgaataaacagaaaagtatctgtgcagttgctaatatttgtagttgcacatggagaaatacattaggtactacatagattaaattgcaggggattaataaagaggctgctttgtttaaatgaatagaacatttatctaactaattatttgatctatttaattttagttggtttgttcatggggaccctggctaaaaacatacttcaaactcttggtgttatcctctttatagtaaaaatggtagtttctctgccacactctattctctcaaaagttataaatgtttgaatgcagtcatctgtacaatatcagatggtctatgtttaactggaatgaaaaaacctcaaaggcacatacgaccatgaggacaccataacctatgaatgacatggtataaaaaaaaaaaaaaactcaaaataatgaaaactgagagtggcactacggccctgaattttggtcacactcttacctacatgagaacttaaccaaaatgggaggaggggatatctaaaataaaattactggaggccttcattctgaactaagcttgtgcactaggcacagagcaaaccaaaatggagtcacttatgctaaatgtgatgtaatcaaacttaaaatttaagaaaatagattctaaaacaggccaagttttgttttctgtaaacagcagatgtaaacacaaggaggtcccctctattgtaattatttaaaaaaataataacctgaagtcgttgtttccacttaaaaaacccacagttctggtatttcacagtggaatttgagactaaataagtacatttttgatggtgacagagaaatatcaatgtctaaagtttggatctgtttctcaaaattgagaaaataactaaaaaagagaaaatgttaattatagcctaatgctgccccctttcatgtttaattttggtcaataggtcattttgtacacagtatactaaaaccacaccgtatatgtaagtagactgtaacccattcttgtacctgtcaggcctctgagcccaagctaagccatcataacccctgtgacctgcacgtatacatccagatgtcctggagtaactgaagaaccacaaaagatgacattccaccattgtgatttgtgcctgttccaccccaactaatcaactgaccttgtgacattctcccctggacaatgagtctcatgatctcccaaccctgcaccctgtgacccccgcccctgctcacaagatataaccacctttaactgtaattttccactacctacccaaatcctataaaactgccccacgcctatctccctttgctgactctctttttggactcagcccacttgtacccaagtgaaataaacagccttgttgctcacacaaagcctgttggtggactctgttcacacgaactcatgtgacatttggtgttgaagacctgggacagggggactcctttgggagactggtcccctgtcctcaccctcactccatgaggagttccacctattacctcaagtcctcagaccaacccagggaacatctcaccaattttaaatcgggtaagcggcctctttttattctcttctccaacctctctcactatccctccacccttcaacccctcccttccttaatttcggttcctttccctttctggtagagacagaggagacatgttttatctgcgaactcaaaacactggcgcccgtcatggagtcggaaagatagtcttcccttggtgtctaattactgagggggcgcttgcctgattattcacccacattccagaggtgtctgatcacctcagggactcctgccttgatccttcaccttggtggcaagtaccacctcccttacaatttgacttcctcttttcctaattgaatacactttatttccttctcctgcctaattgccctggccagaacttccaacactatgttgaataagagtggtgagacagggcatccctgtcttgtgccagttttcaaagggaatgcttccggtttttgcccattcagtatgatattggctgtgggtttgtcataaatagctcttattactttgagatacatcccatcaatacctaatttattgagagtttttagcatgaagggctgttgaattttgtcaaaggccttttctgcatctattgagataatcatgtggtttttgtctttggttctgcttatatgctggattacgtttattgatttgcatatgttgaaccagccttgcatcccagggatgaagcccacttgatcatggtggataagctttttgatgtgctgctggattgggtttgccagtattttattgaggatttttgcatcgatgttcatcagggatattggtctaaaattgtctttttttgttgtgcttctgtcaggctttggtatcaggatgatgccggcctcataaaatgagttagggaggattccctctttttctattgatgggaatagtttcagaaggaatggtaccagcaactccttgtacctcaggtagaattcagctgtgaatccatctagtcctggactttttttggttggtaagctattaattattgcctcaatttcagagcctgttattggtctattcagggattcaacttcttcctcgtttagtcttgggagggtgtatgtgtccaggaatttatccatttcttctagattttttagtttatttacatacaggtgtttatagtattctctgatggtagtttgtatttctgtgggatgggtggtgttatcccctttgtcattttttattgtgtctatttgattcttctctcttttcttctttattagtcttgctagggacaacattcttttatgcagtccttttcagttatccccaccttcccagttgccttatgaggttgagacgttttaacaaaattatctgctacactgactattcctgtactgcagcccatctcattgctgctcttctccccaactcaaagcctccttcatgtcttcctcttgtatcacccccaccttaacccacaagtgtgggacacctctactccctctctggcaacaaatcacacacccattactatcccattaaaacctaatcacacttaccccactcaatgccagtatcccatcccacaacagactttgaagggactaaagcctgtccagaatcttcaccttatcaacaaaattgtctttcctatccacctggtggtgccaaacccatatactctcctatcctcaatacctccctccacaacccattattctgttctggatctcaaagatgctttctttattactcctttacacccttcatcccagcctcttttcactttcacttggactggccctgacacccatcggtctcagcaacttacctgggctgtaccgctgcaaggcttcaggcacagcccccattacttcagtcaagcctttcttcatgatttactttctttccatccatctgcttctcaccttattcaatattttgatgaccttctactttatagcccctcctgcgaatggtctcaacaagacaccctcctgctccttcaacatttattctccaagggatattgggtattcccctccaaagctcaaatttcttctccatctgttacctacctcagcataattcttcatgagaacacgtgtgctctccctgccaattgtgtccagctgatctctcaaaccccagccccttctacaaagcaacaactcctttccttcctgggcatagttgtatactttcacctttggatacctggttttgccatcctaacaaagctgttgtacctgagcgagttagagaaaatgtcacactttgagatgaattaagagtccatttatttagccagcggccaacagatggctaatgctcaaaattctctcagccctgaagaaggggctagattttcttttatactttggtttagaaaggggagggggctctagttaaaacaattttacagaaataaagtaggcaaaaagttaaaaggataaatggttacaggaaagtaagcagttccaggtgcaggggctttaagactattacaaggtgatagacccagggctttgggcgttatcaatgggacgaattcctgggaattgtggatatagcttgccacagtatcttatcagttaattgcattcttggatgtgctgggagtcagcttgcacaagttaagtccttgaggaagggggtgccagtgaaagagccaagatggagtatgtctggctctcttagcaaagggagagtcaattcaggtggaaaaaggctaggtgattaaaggaaaagggagagtctaaaaacagtgttagtaaaaacaaggttgggcattacattcctcacttgtgtttttggggaatcaaatcgttgattcctcagttatagcaagggggttatactgagtcttaagatacataagtttgacagaagctatgcattgttttacaaaatgaagaaactaatttaatatgcaaggcccaaaaattagacttaataataggatggggaggggtccggctaacttagtgattagagtagttatccctgggttctagttgaacatgctttgatactaggggatgttattttctcatttttgttggtgcctatctagattttctcacaccttttggagtgtatcttttatgactaagaatggtggaggaacagttaaatcaactttgtcagggtgtttctggaacataaggttacttagatcagttaaaggcctaattgacttaggtgggctctatgagactaaaattttcttttggatggtgaacatagttctaacatcgaatcctgggatataaagtcttaatctttatgacatgccataatactattgaactgaattagggtcatgaactgttatagtaagaggattacaatttttttagtacatgatttaggacaagaagctttagttatggaatgaagatctggttgatcctctagagtaggtggctaaagttacacatgtctaatcagggcagaaaaactgataagtatattgacagctagcgtcagggtgatttctaggacagaggtaaaagtcaacattttggagtctttttttctgcacttttggagcttctacatctagtttggctcttggagcgcttaaatcttgctgcaaggtcaacacttcctgctcctgggactggcagattgtgttgctcttcatgggtaccggctggctctgggaagagtacacataaatcaactgcaaaggagacttctttggaggtaccagccttctaagtggtgtttgcaaatacacgtcctgttgtgaaagaggtgaggagaaaggagtaggaagatacagaggatttaaagggcaaaaacaaacaagtgaggtagataaaaagaattaacctaatggcttcacttgacttaggcacagttttaaggggcctgacctaggcctggagacctatgtttctagttgggctgtgttggtctttttgatgcaggagtgatgaatctaagcaggagtaccatccaccttcagagccattggcatcgtgaggatagtggtgtgaggtcttttctaagcaggagtgagtccttctttttggaactttttaacaaacactaggtctcctggctggaacaaatggcaggaacctgtctggtcaggaattggattgggatgggctcctcgaacaagtggcaggatgatatcttgtacttgttggagagactgtaggtactgtaataaattagcttgtgatatttctgccaattgggcatctcttagcttaggcaacatagtcagtgccttcctatacatgacttcaaaaagtgagaacctagcctagtaaggggtgcatcttactttaagtagggctaaaagaaggagacttacctaattttcaccggtttttaagattaattttgtaagagtgttttttagggtgtggttcatgcgttctacttacctagagctctggggtcgataggcaccatggagcttccattgaatgttaaacaccttactgaccgactgagctatggacgaggtgaaggccggtccattatcagaccttatggcagcaggcagcctatgtcaagggatgatttcattgagtaaaaactattgcgctggcagtttcgtttttggtagcaaatgcctcagtgcatccggagaaggtgtctgctagtactagaaggtatctgtacttatcctggcgtggttttacttctgtaaagccgatttcatacttttcttctggtgagttttctcagagatggtggcctgggctgggattaggaccttgcttggcatttacctgggcgtaggttgtgcaccggagagctgcttgatctgttaggctttgaagacagggcattcttctttgtttttgatagcctttcctgctgaggtgagtagcctgcactcctggtagatggctccatgaacatgcacagtagcaaaggcgtacctgctgtcagtgtaaacgttaatatccttaccccatcggagaacctgagtgagggcgatcaattcagctttttgcgctgacgtgtttgctggtaaagcctgagcctacgacacatttgtctccgtggtaacagctgcaccggcctttcgtactccctgctcgagaaagctgctaccgtctgtgaacacagtggcgtccgccttctctagggccacatcttgaaggtcaagtcggccagtttcagtagtttctaacagttcctgacagtcatgaatagtagctggatttaaacaccttgtgggagagaaagtcaaacgaggctgatctaacagtaaactctgatactgcaggatgcgagcatttgacatctattcaccagaagcactttaaagtaaagtctctacagcatgaggagccgtaagagttaaattttggcctagaatcaacttatcagccgcttggactaggcttgctgtagccgctacagctcgcagatgacttggctatccggaggccacaggatccagtctcttagataaataggccactgggcatctccagagtcttaaagtctgtagtcttaagcttttttagcaacttcctggctttcatggacaaacaggtgaaacggctttgagatattagggagggctaaagcaggggcttcagttaatgtctttttcaggttttgaaaagtctgttcttttgtgtctgtccaaattaatgggccatttcatcctgtacttcttggatagccactattaagatttttgtttgtcttttgaatgctttatcagtggccttttcagctgcctgtgttgcttatttctgtttttcaaactctcgattgtcaaaaaccttttgggctatttctaaaagctgactgatattcattccagcaaatccttccagtttttggagttttctttttaatatctggggctgcctgagccacaaatgctaaattaggaggacggctattttcgggggccgttgggtcaaaagctgtgtaaatccgataagcctcctggaggcgctctaaaaacgctcctggtgactcatcgggcctctggacgacttcagtcaccttagataagtttatgggtttctgagcagctcctttaatacccgctaggggataccagtggaaattgtctaaagctttccctccacttgaggaatttgggtcttaattaggccgggtagaggggaaaccctcctccaggaggtctctagcttcctcctctggctattggctgatgtgaggttgacaatcatcctaggtgggccgatgtgtctggagtatggactccatcagtgaggtcaaagcctggggcttttcagagaagggaggattatgggttttctaattatacaagtcagaattagaaagaagggacataaactaagaagggggctgagcgcttgtcacctggagggacttgtgcctctcttagtggtagtagaggggctacttcctcctgctgtggcttcagttgaggggcaatgggtggtgagcctacaggaggtgtcgtcgagaagacatgggatgaccttaagggagcaggctggttgtaaggcggtgcgacttggtgagggagactctcctcttcttcagagggaggcagtacagggggagccaaccagccgagggtcgaggcaaaaacgtggtctggctcaggaggactttggaggtagaattattaatggcgcatgaatggagccatggaagagggctcctgaccaaactcagccattgatcaatgtgatcagggtggctgggagtttcggtaacaacctgccacacagcttgaacaattgtaggattcagtgacctttcagggggccacctaactctaaactttggctattctatcttgcagagtgtccagagcttgccttttttaaggcagactgcataatctttggaaaaactgagaaaaattctgtagcatacattggagagggctctaacttttacaaggccgggaggaagtgtttcttttttttcttttcttttttttttttttttaaaaaggcaatttaacagaatttgagcagagatatcagatctaacatggacagagacactcactccctggggggctggagtatcggaaaaacagaattaacataactagaaagaacagaaaaactacaacagctaatactacttgtcacattgctgtagctttaagattgagggaaggggactagaggctagtctgaggtctcctgggttggttggatctaggcgttctcctcctttttcttctagacctgtaccttaaatacctttgatgtctccacaactcaaaggcaaatagctcaaattcagctctttcttttaagggttcaaggagtgagagcagagccaagtcctggaaatgctgaacttgttgtcacaccagaaaatgagatgtgcagcatagggggcagggatgaggaggaaaaggaccactcagatcatccttaagatgagagagtagccacagaggaacagagtaggaatctaaacgaagtaaagcagtacgggcataggtttccttagacagtgttctatttaagagcacaggaaaagttacagaatgacaaaagaggttagcaaggaaatctgcagggtggctattttgaacctactacaaatttaatctagaggaggtctaatcacttggatgtggggtatgacaatctaaatgcctacaacctccatggtgccagaaatcttaatctgatgaatgttcttcacacttgttcctgtaacaacacttgacttgcctctggcagaaaagacaggactgtggtggccagcctaaatgattgatgagaaacttaacctcttgtgacaaaaaatcagcactaaggaccttgaagaagtttttacctagacgtcttgggcaatacttacatcttgacatgcaaaaccttgacgactactaaacaagacaatagacactgaacaaaacaataaacataaaacaaacaattgactttagggcatgtaaacagttataacagttttcctatttattttttattagacagacaaggggagggggtcctgtgatgggatcattcagatgtctgcctggcctctcttgctgaggggacttgggctcctgttataattggcaggccggtgtaaacctctggctcggatcgagctatgcctgatgctgccttaagccttatgaggtcaccacggaactgcaggtgaggacccactcaaactccatagcttttgctgtggagctacaaactggaagacaaacgcaagcccttgtcttccccactcactcaccattcacacagagtttataacaatttttttctcttttctttttttccttcttggagattctccaagaaacttgaacaagagaaagacgagagatgaaaaaagagagagagagactggtctgccagaaactaaggttcagttccccagcatcctgggacgtgaactcagtcaagggagggcccccatcaggaccacttcctacctaaaccaagacacaaaggcacctacgagaaaaccaaggctcaaccttttagcatcctggagtaacgggctgagtcaaaagagggacgcctttgtcagggctgcttccttcttaccagaatcgaagtcaaatctgacctacctgaacctggggtcagaagctgaggactcagatgttgaattttagggcacccacacggtagttgatccgctctcctccggaagacagtcacccttcagggacctgaaaaaaatttttcaggtggcacctccccctataagccagccatctgtcctggggagcccagagcgagaaaggctctcgcccagtggcgttaatatctcactggggcctccaaatcttgtacctgagtaagttagagaaaacaccacactttgagaagaattaagagtccgtttatttagccagcggccaagagacagctaacgctcaaaattctcttggccctgaagaaggggctagattttcttttatactttggtttagaaaggggagggggttctagttaaaacaattttacagaaataaagtaggcaaaaagttaaaaggataaatggttacaggaaagtaagcagttccaggtgcaggggctttaagactattacaaagtgatagactcggggctttgggcgttatcaatcagatgaattcctgggaattgcggacatagcttgccacagtatcttatcagttaattgcattattggatgtgctgggagtcagcctgcacaagttaagtccttgaggaaggggctgccagtgaaagagccaagatggagtctgtctggctctcttagctaaagtagagtcaattcaggtataaacaaggctaagtgattaaaggaaaaaggagaatctaaaaacaaggttagtaaaaacaaagttaggcattacaaaaccattatataaactcacaaatggaaacctagctgacctcaaagatcccaaatcctttccccactcctctttccgttccttgaaaacagctctagagattgctcccacactagctctccctgactcatcccaacattttttattacacacagccaaagtgcagagctgtgcagtcagaattcttacacaaggaccaggactgcatcctgtaggctttttgtcgaaacaacttgaccttactgttttaggctgtctttcatgtctgcatgcagtggctgttgccactctaatacttttagaggccctcaaaatcacaaactatgctcaactcactctctacagttctcataacttccaaaatctattttcttacacttattgcatatactttctgccccccccccaccccctaccccagctccttcagctgtactcactctttgttgagtcctacaattaccattgttcctggcccagacttcaatccggcctcccacattattcctgataccacacctgacccccatgactgtctctctctgatccacctggcattaactccatttccccatatttccttctttcctgttcctcaccctgatcacattttgtttattaatggcagttccaccaggcctaatcaccactcaccagcaaaagcaggctatgctatagtatcttccacatttatcattgaagctactgctctgccccacctccactacctctcagcaagccaaactcattaccttaattcaagccctcactcttgcaaaaggactgcatgtgaatatttatattgattctaaatatgcctttcatatcctgcaccaccatgctgttatatgggttggaagaggtttcctcactatgcgaaggtcctacatcattaatgcatctttcataataacacttccaaaggaagatggagtccttcactgcaaaggccatcaaagggcctcagaccccattgctcaaggcaacaattatgctgataagacagctaaggaagcagccagtattcctacttctgtccctcatggccagtttttctccttctcatctgtcattcctacttactctcccactgaagtttccacctatcaatccctccccactcaaggcaaatggttcttggaccaaggaaaatatctccttccagcatcacaggcccattctattctgtctgtcatcatttctttctttttttttttttttttttttttgagatggagtctcgctctgtcacctaggctggagttcagtggcacgatctcagctcattgcaagctccacctccggggttcatgccattctcctgcctcagcctcccaagtagctgggactacaggtgcctgccaccatgcctggctaagtgattctcctgcctgagcctctcaagtagctgggattacaggcatgcaccacaggttgtagagtttgaggggtcagattcttaacaagaactgattgttcagctatggtgtcttcatatggctgggaatctgaagtaggcaagagaagattagcagcctggcaaatttcctgtctagcttgctagaggattggaacatagacgcctagagggctggtgtctgggatgaggtcggggccaagcaagaaagtgcatccatataaaagttcaaatggactgtaccctttagcatctcaaggacaggctctaattctgagaagggcaagaggtaaaagtactgtccattctgttttaagttggtggctgagcttggtgaggtgtgtctttaaaagaccattagtccgttctacctttccagaggattgaggacggtaagaggtatgaaggttccactgaatatcaagagcctgagaaactactggggtgatttgactaataaaggcctgtcccttttcagactgtatagaggtgggaaggccaaaccaaggaactatgtctgacagaagggaagaaatgacggcagtggccttctcagaccctgtgggaaaggcctctacccatccagtgaaagtgtctacccagaccataaggtattttagtttcctgactcagggcatgtgagtaaagtcaatttgccagtcctgggcaggggcaaatcccaagcttgatgtgtagggaagggagagggcctgaacaatccctgagagtagtagaatagcagatggaacactgagaagtgatttccttgaggatagcaatttcaattgctcttttttattcgtggccaggcatggtggctcatgcctgtaatcccagcactttgggaggctaaggcgggcagatcatgagatcaggagatcgagaccatcctgactaacatggtgaaaccccatctctactaaaaatgcaaaaaaaatggcgtgaacctgggaggcggagcttgcagtgagccgagatcatgccactgcactccagcctaggcgacagagagagactccatctaaaaaaatattaaaaaaaaaagacattgtagccaacaaatacatgcaatgattatattttgattaaaaacataatcttttaaaaggagcaattattttttattcaatgaatctttgatacagtcactttaaattcttaggtgttaagcctataaatgttcaatggcttaggtaatgtcttatactgcatatcctacatgctaatcactgtgactatcagattctcttttgttcatagcattttttaaatataatattttgtttttcttattaaaatttatttttctgtcatgcctaaatcttgataaaaataaagaggatgggtttgcctgatttattccaaagtcaaatagcagttttgcttttttctttttagtcagtaactcatttgtttcacacaataaacatgagaattaaataattcaattatagttatatcctcatgctaacaatggagaaatatttgagttattttttgatagggctaaaatcttattttatatttttattacagattatttcatgtcaagtgactagaatatgaattttaataatatactatgaaattagaaaatgtgatagtcacagattatggaagtacagtgaagaaatagattatattaagaggtgatttattatatctataataaaatggagtatataaatagccatataacaagtaaagtaaaaaggttacttaaaatgtttttacataaaaagctcagtgtcaagttgcttaaattttaaattttaccaacacttaatgaaaagttgataccaatttcccacaaaaactgtgagcaatagaagaggtaacatttcccaattcatctattagccaggattaccatgaccccgaaaccagacaaaagaatcagaaataatgaagactatggaacaacgtcccatataaatatagatgcagaaattttcagaaacactagcaaattaaatccagcaacatatgaaaatgagttcataccatgaacaggtaatattttttcacaaatttagtgttgacttaatatttaaaaaatcaactaacatattacaaaatagtaattactcacaggttttgtcctggtcgcttcacctgtgcaggacccaagaatctgctctgctcttgttgctctaagaagccaggtgcttaaccatgagaaccaggagaaagaaagctgagggagccagaagaggaagcgagctacagaaagaggggtgacaggacctccaggcgcagggtgcttcgggcagggaggcgggcagggctggcggctgcctgggtcaggtagcatgaggtggatctgagggtactcacggacaggatgttccagcaacgaaaagagcagaagctccagcttttagttgcatggccattaccacgaccaaacaatgggaaaaggactgactctccaacaaatggcaccagagaacttcatgtttaaattaaaaaaaaaaaaaacaaaacttgggtctgggcgcggtggctcacgcctgtgatcctagcactttgggaggccgaggcgggcggaacactggagatcaggagttcgagaccaacctgaccaacatgacgaaaaccctgtctctactaaaaatacaacattagctgggcgtggtggcaagtacctgtaatcccagctactcgggaggctgagtcaggcgaatcgcttgaacccaggaggcagaagttgcagtgagccgagatcgtgccactgcactgcagcctgggtaacagagcaagactctgtctcaaaacaaaaaaacaaaaaccttggacccttttttttttgcatattatacaaaaaatgtctatgtatgcaaagcagaaactggaagtaacatttgcatactcatgttgataatcatattattcacaaaaccaaaacttggaagcttcttaaatgatttttgatgtataattttttttttttaaattgaaacagggtctcactctgtcgtccaagttgaagtgcagcggcgccatctcggctcactgcaacctccgcctccggggttcaagtgattctcctgcctcagcctctggagtagctgggattacaggcgtgtgccgccacacccggataatttttgtaattttagtagagacggggtttcaccatgttggccaggctggtctggaactcccgacctcaggtgatctgcccacctctgccttccaaagtgctggggattacaggcttgagctctcacaccgagccgtataaatggatttttaaaatggcatatacatgcgatggaatataattataccttataaaaggaaattacgtcacatgctacaatgaagataaacctttagggccagtgtggtggctcactcgtgtaattcagtttgagagggtgaggcaaaaaaatgttttgagcacaggagtttatgactagccgggcaacacacacacacgcacgcacacacacacacacacacacacacacacacaaaggataaacctttaggacattatgttaagtgaattatgccaggaacaaaataacaaagagcatataatttgatttacatgagatatcttcagtagtcaaattaataaaaattgaaagtagaatggtgcttgtcaacaactggggtagggggtaaaaggggaagttcttgcttaatgggtttgaattttgagttttacttttgcaaaatgtaaaagttctaaaggtcttttgcataacttttttttttttttgatactgagtcttgctatgtcgcccaggctggagtgcagtagcatgatatcggctcactgcaacctccacctcccgggttcaagcaattctcctgcctcagcctcctgagtagcggaaattacaggcacctgccaccatgcctggctaatttttttattgcataacaattttaatacacttaatactactaaactataaacttcatggtcaaatatatgtaataacattttaaaaagcataattattaaaagtatacaatttttaattaaataggattgactttgcatcttctttgctttatgattatgtaaaagttttacttccattatcatgccaattttctaccttctctttctttttttttttttgtttttttgagatggagtctcactctgtcccccaggctgaagtgcagaggcatgatctcagctcactggaaactttgcctcccgggttcaagcaattctcctgcctcagcctccaagtagttgggactacaggcacgtgccaccatgcccggctaatttttgtatttttagtaaagacggggtttcaccatattggccaggctggtctcgagctcctgaccttgtgatccatcctcctaggcctcccaaagtgccaccaatcccggccattctaccttctctttctaatcctactgagattttcttaactcttttctattcttgcataattaataaattcaatgcatttctctgagatttattgtaacaatgaaatttttacttttactttttttttttcttgagacggagtctcgctctgtcgcccaggctggagtgcagtggtgcaatctcggctcactgcaagctccgcctcccgggttcacgccattctcctgcctcagcctcccgagtagctgggaccacaggtgcccgccaccacgcccggctaattttttgtatttttagtagagatggggtttccatgttagccaggatggtctcgatctcctgacctcgtgatccacccgccttggcctcccaaagtgctgggattacaggtgtgagccacggcgcccagctaagatttgtttcttgttcatagaattgttacacagattaactgcatttttactagtttttgtctttattccaaaatccaggctggtgaagcggcttctctctacattttactgattttcatggcttagagaaaagaagcagttggccgggcgcagacgctcacgcctgcaatcccagcattttgggaggctgaggagggcagatcccgaggtcaggagttcaagaccagcctggccaacatggtgaaacaccatctctagtaaagatacaaaaaattagccgagcatggtggcgtgtgcctgtagtcccagctacttggaaggctgaggcatgagaattgcttgaacctgggaggtggaggttgcagtgaggtgagatggcaccactgcactccagcctgggtgacagggtgagactccatctcaaaaaaataaataaataaataaaaagaagcggtcaaccacacattgactcttaaaatttatgctcagaagggacacaccttactttagtctattttcactggccaaataaagttaaatagccaagtctgatgtctatggggtaagaaaatataattctcttgggagggtcatcaaatatcaggaaacaataatacaacttaccacaaaaccttcctactcagctgaatattaaattataatatagtcattcataaacaaaggaactttgcatttaatactatttattagtaataatatttaatatctattgtttgcttattttctgctagaatcaatgatatgcattttatttttttaatttttttagatagggtctcactcttttatccaggctggagggcagtggtgtaatcacagctcatggcagtctcaatctcttgctgaaatgatcctcccacctcagcttcctaggtagctgagattacaggcatgcaccactgcacctggctaatttgtttcattttttttttttggacagatggggtgtagctatgttgcccaggatgctatccaactcctttgctccagcagtctacctgtcttggcctatcagtgctggcataggctgctgtgcccagccaatgataagtgggtttttttttgtttgtttttgttttgttttgtgttgttttgagacggagtctcgctctgtggcccaggctggagtgcagtggcatgatcttggctcactgcaacctctgcctcccgggttcaagtgattcttctgcctcagactcccgagtagctgggactacaggtgcccgtcaccacacctggctaatttttgtatttttagtagagaccaggtttcaccatattggccaggctggtctcgaactcctgacctccagtgatctgcctgcctcggcctcccaaagtgctgggattacaggcatgagccactacacctggcccatcataagtattttatatgtgctatttcatttaaatgtaagaggctggtatataattatccctattttaaagatgaagctagtaaaatgtagtgaagttttgagttgcataaataatgaagtagagctgcctctaatccttagtaaattgccatacgcacactaatagtaacaatgtgtcagtttataaatgcgcatgaagttgtacccaaagctactgatatttttctttactaatttggattatccttggagctgccatgaataaaatatccatctagagcccacaagagagcagcacatctgagaacaaacatgaaaacaatgaagcagccacttttagtgagctcagcagaaccatgggttcaaactctactgaccatacttataaaccatccagggctccaggacaactaaaactgtggcttctaataatggagaaccacctatgacatttaaggtgtgactttttaaaactgaaaagaacaaatatgattactgctaacgtttttattctgtttatttgactttgaggatgaatgagtagatgtaagagagggcaatgatatgtcttaatagtcttctgaagtaataaataatttgatttggtctgtcagaagtctattggctactaccaaacaaaccacagttatcccgcgttcaagcgattctcctgcctcagcctcctaagtagctgggactacaggcgcctggctaattttttgtatttttagtggagacggggtttcaccatgttgtccaggattgtcttgatcacctgacctcatgatccgcctgcctcggctggcgtgagccaccgcgcctggttggctggagtgcagtggcgcgatctcagctcactgcaacctgcgcctcctgcgttcaagcgattctcctgcctcagcctcccgagtagttgggattacaggtgcgcaacgccacgcacagatactttttttttgtatttttagtagagacggggtttcaccatgatggccgggatggtctcgatcacttgacctcgtgatccgcctgcctcggcctcccaaagtgctgggatcacatgtgagccaccgtgcctagcccaacagcatcatttttatctaaagctgtagttcagcaaatgctataaggtgaataattaaatattatttactacagacccaagcagtctactatgattttattaccctttaatacaaatttatttcttgaattaaataattatttctctattttagttgtattttctttgtgtctgttgctaagttttgctgaaatactaccattttacttaaacttgccccacagttttttatttgtttaaaaaacttcaaaaaaaatattgtaaacatgacagcttgcattggtagtcccagctactcaggaggctgaggaaggataatttcttgaacccgggcagtggaggtttcagtgagctgagatgtcgccattgcactccagcctgggcagcaagagtgaaactccatctcaaactaaaaaaaaaaaaaaaaaaaaagaaaaagaaaaatgtagaattcaatatgctaaaacaacttttttatatcaaatatatacatcatattgatggttgtctgatacgaatattaagtgttctgtattagattttgcaaaatatataatttttttgcacgagtcatgagcaaaagcccaactattcaaatggccataaaaaatgatttttttgaaaaataatatatgattttaaaaagtttgggccgggcgtggtacctcgcacctgtaatctcagcacttttagaggccgagatgagccgatcacctgaggtcaggagttcaagaccggcctggccaacatggtgaagccctgtctctactaaaaatagaaaaattagccaggcgctgtagcatgtgcctgtaattgcaactactcgggaggctgaggcagcagagttgcttgaacccaggaggtggaggttgcagtgatccaaggtcgtaccactgcactccagcctgggcaacagagagagactccatctcaaaaaataaataaataaataaataaataaataaataaataataaagagcaaaacaccatctcaaaaaaagaaaattaccattctctgctctttttttttggttcgttttttgggtttgtttgtttgttttgagacagaatctctctctgttactcaggctggagtgcagtggcacaatctcagctcactgcaacctccacctcccgggttcaagcaattctcctgcctcggcctcccgagtagctgggattacagccatgtgccacgacacctggctaatttttgtatttttagtagagacagggtttcaccatgttggccaggctggcctcgaacttctgaccttgtgatccacccacctcggcctcccaaagtgctgggattacaggcgtgagccaccacgcctggccaacggttttcttttttacagatgagggtttgctacattgcctaggctgttctcaaagtcattggctcaagcaatgaggctcctgcctcagcctcccaaaatgctcgctgtaatatttaataatacttatatgagtcaagtgtgctggctcatgcctgtaatctcaacactttggaggctgaggggaaaaaatagtttgagttcaggagattaagacgagtcttggcaacatcgtgaaacctcatctcgactacaaataaaaaaatagtaagtggacatggtgatacatactacagtactagctacttgagaggcttatgtggaaagaccccttgagccctggagatcgaggttgcagtgagctataatcacaccactgcactccagcctgggcaacagagtgagactctatctcaaaaatacttatagacagaatgcatttatataattttgttattcactgtattggattaacttataaacaaaaaatataatacagtcaaaggcggaatcatccctttctagtctttcttttgcctttcatgttagctcctcactcccaaagcaacccagcctgtagggctagatgttgccatgctgccaactgtttacattcttactctgataccacattagcttttctgagcatatctctcagagaagaattttgctttatatttgtgtatgtaagagactataaggttggctttcttactacttctttttcaatgattaaaaacaaatcctggggccgggcgcggtggctcacgcttgtaatcccagcactttgggaggccgaggcaggcggatcacgaggtcaggagatcgagaccacggtgaaaccccgtctctactaaaaatacaaaaaattagccgggcgtggtggcgggcgcctgtagtcccagctactcgggaggctgaggcaggagaatggcgtgaacccgggaggcggagcttgcagtgagccaagatcacgccactgcactccagcctgggtgacagaacgagactccgtctcaaaaaaaataaaaataaaataaaataaaaaaacaaaaaaaaaaacaaatcctgggccagacgcagtggctcacggctgtaatcccggtactttgggaggccgaggtgagtggatcacccgagatcaggaggtcaagaccagccttgccaacatggtaaaaccccgtctctactaaaaatacaaaaattagccaggcgtggttggtggccggcacctgtaatcccagctacttggcaggagaattggttgaacccgggaggaggaggttgcagtgagcccagatcgcaccattgtgctccagactaggtgacaagagtgagactctgtttcacaaacaaacacacaaacaaacaaacacacaaaatcttggctgctggcaaccaggcacagccaagtaaggtgagggcagaaagcagatacttgcaatccatggtgcatcagcttttttaacatattttttctccccaactacatagaaaatatcctaagtgatctcatgcatctttgaatccaaacatctcattttttgccttatccatattacaaacgtattcacaatttataatgcataatcaatctattggaaaatattcaaaacaaatgcattctcttcatggaaccaagtagtacacctgaattaaaatttgtattgagaattattagtataataattttttaaaaaattattaagtacttttagatgtttagcacttggaaaatattataaaaaccctctcaaaattaacctgggactccaaaagacatgtatggtccaaacagttcttttcttcacaacaccgaggaatggcatacaaggctgtctccaagaggtcacatctcttccagaccttaacgaaccttaaaaataatttttcatgtgcagtgactagcaagaaatcaaagatgacaaagctcacaataaataagacagtgtgaaatacaccagaaaaaaaataactgaagcaaatttgcaaagacatctaatattagaattatcagatacgaaaatattaaaaacaactacgcctaccatattacaagaagataaagtattggcaggaaaaaaaatattaaaagttttaaaaataactaagttgtggctgggcgcggtggctcacatctgtaattccagcacttcggtaggctgaggtggatcacctgagatcaggggttcaaaaccagcctggccaacatgataaaacctcatctcaggccgggcatggtggctcacgcctgtaatcccagcactttgggaggccaaggcaggcggatcacgaggtcaggagatcgagaccatcctagctaacacggtgaaaccccgtctctactaaaaatacaaaaaaaaattagccgggcgtggtggcgggtgcctgtagtcccagctatttgggaaactgaagcaggagaattgcttgaacctgggaggcagaggttgcagtgagccaagattgcgccactgcactccagcctggggaacaagtgtgaaactccatctcaaataaaataaaatgaccaagttgtagaatgaataatacaataactaaaatgaaaaactcgctagtcacatttgaacttatgtgcacaagacagaaccagtaaactagatgctagatcagaagaaattaacacataggcaacaaatgtcagtctcagaaaacttttctggtaagttttccagacattcaaaatttaaaactgaaaagcataatgttgatattatttagcctcttccaaaaaatagagtaagtaaaaaaccctgcataacttaattcctgagttaataccaaagcttgacagaaacaaaatgagagcaactatagacaatctcattaagacaaatagaaaaaaatgttaaagcaattgctaacaaactaaattttgctctgtaaaaaataaataaaaccataagtaagtttggtacagtataagttgaaattgtaaaatctacatgtctatatataataggcacagaaaaagagtttggtaaaaactttttagcaaactagaaataaaagaaaatttcattttattttctaaatatacaaggtatctaaaataaactacagcaaatgtaaatgtacaactattgaaagcttgtcttttgatgtcataaacatgataatgatgctgctgtcgacgtttttattaaacattgcatgtatggctccagccaacaaaataaaatgagaaattagtattacaattatattggcaaagcagaactagtcaataaactagtacctaaacaactgttctacctaggtagattgcatctctgcaaagcaactcacacaaaaattgttcacatagatcgaggatttaaaacttttgggagaaaatagaggataacattgtttttattaaaggaggagaccacccctcatattgtcttatgcccaatttctgcctccaaagaaagaagaagtaaaaactaaaaggcagaaatgaaatccacaggcagacagcccggcgccatgccctgggcctggttaaagattgacccctgacctaaccggttatgttatctatagattccagacattgtatggaaaagcattgtgaaaatccctgtcctgttctgttccgttctgattaccggtgcatgcagcccccagtcatgtaccccctgcttgctcaatcgatcaggaccccctcacgtggacccccttagagttgtaagcccttaaaagcgacaggaattgctcactcagggagctcggtttttggagacgtgagtcttgctgaagctcctggccaaataaagcccttccttctttaactcggtgtctgaggggttttgtctgcggcttgtcctgctacattataactgtggggtaaaaagacttattaaacatatagaaatagtgcataggctgggcacagttgctgatgcctgtaatatcagcactttgtgagctccaggtgggtggattacttctggtcagaagttcaagaccagccaggccaaaatggtgaaaccccatctctactaaaaacacaaaaattagcgaagtgtggtggcacatgtctgtagtctcagttactactcagaaggctgaggcatgagcatcacttgaagcaggaaagcagaggttgcagtgagctgagattgtgccattgcactccaccctgagcgacagagtgagacttcgtctcaaaaaaaaaaaaagcatgaaaatatgtataaattagactatatcaattttaagaatgtttaattatcaaaatcttataaaaacatgttttagtaaaaatagtggaaaaagcacatagtggaaaatgttttaaaaacacctattacaggctgggcccagtggctcacacctgtaatcccagcactttgggaggccgaggcgggtggatcacctgaggtcaggagttcaagaccagcctggccaatatagtgaaaccccatctctactaaaaatacaaaaacttagcaggcgtggtagtgggagtctgtagtcccagctactcgggaggttgaggcaggagaatcgcttgaacccaggaagcggaggttgcagtgagccaagatcgtgccactgcactccagcctgagcgacagagcgagcctccatctaaaaaaaaaacaaaacaaacatgttaaaaatatcagcatttagaaaatatatattacagaatatgtgtgcataaacaaggaaatgacaaacatttaaaataggacagatggcaaatcttaaaacaagaacttataaaaattgctaactctattagtaagcatggaaatgctaattgaaactacaaatgatacactttctttttttttttttttttttgagacggagtcttgttctgtctcccaggctggagtgcagtggcgtgatctcggctcactacaacctctgcctcctgggttcatgcctttctcctgcctcagcctcccgagtagctggactacaggcgccggccaccatgtctggctaattttttttttttttttttttttttttttttgagacggagtctcgctctgtcacccaggctggagtgcaatggcgcaatctcggctcactgcaagctccgcctcccgggttcacgccattctcctgcctcagcctcccgagtagctgggactacaggcgcccgccaccacgcccggctaattttttgtatttttagtagagatggggtttcaccgtgttagctaggatggtctcgatttcctgacctcgtgatctgcccccctcggcctcccaaagtactgggattacaggcgtgagccactgcgcccggccaaattttttatatttttagtagagacgggggtttcaccatgttagccaggatggtctcgatctcctgacctcgtgatccgcccacctcggcctcccaaagtgctgagattacaggcttgagccaccgcgcccggcagatacacctttctaatttaccattttgtcaaataattatgtctagtagttttaagagttgataaaaatgtgaagtaattcaaatatccactggcaatagacgtggtttataaattgatgtatgtttgcattatgcaacagtaaaaatacagaactaaaggccgggcacggtggctcactcctgtaatcccagcactttgggagaccaaggcaggcagatcacgaggtcaagagatcgagaccatcctggccaacatggtgaaaccccgtctctactaaaaatacaaaacttagctgggcgtggtggcacgcacctgtaatcccagctactcgggaggctgaggtaggagaatcgcttaaacccgggaagcgaaggttgcagggagcggagattgccactgcactccagtctgggcaacagagccagactctgtctcaaaaaaaaaaaaaaaaaaaaaagagacctatagctatgcaaagcaacatgaaaaaatagaaaaacaacataaataagcaagtcacagatgaaaagttatgctagaatatacatacaggcaaaaaataggcaacactgaaatgtatattgtttatacttaaaattgcataaagtaaatggtaacagaggccgggcgcggtggctcatgcctgtaatcccagcactatgggaggccgaggcaggcggatcaccaggtcaggagatcagtaccatcctggctaatatgatgaaaccccatctctactaaaaatacaaaaaacattagccgggcgtggtggcacgcgcctgtaatcccagctactccggaggctgaggcaggagaattgcttgaacccgggaggcggaggttgcagtgagccgagatcccgccactgcactcccgcctgggcgatttcaaagcgagactctgtctcaaaaaaaaaaaaaaaaaaaaaaaaagggaaataacacaaaattcaggtagtggtcactttggggtaggaggttaatagaagactatagaggtattgactttacaggagtgtgtgacgattttatgcagcaagactgaaagttttaaaagagtaaagaccaatacttttatttttttcattttatttcctaaggctagcaaaaagtatggcacaaagtgtgtgctccacacacatttctaggttaaatgaatgaatacatcccctttgtaagctgtcaagctatgcaaaccaagactttattattattagttactatagattagtttatagaatcaaatgaaaggtaatgaactgtgggattcagaaagcactattgaaagttcaatgttaccccagcattcttaggtaaaataaattaaaatttttagtttctaaatttgcgaccattataattacatttaatttgccacgtgtagatggaacatgaaatcttacttcaggcgagcataatttgagatgaaaaggcaaaaaggaaaaaaatttaaaaagaataaaaacttgattgagtcaaatctgcaagttctactttatacttaaaaaaaaaattgtttccttctctcctgacccagagtgaggctggctggggagcctgggtccctctgtccttcccgcggtggcagtggctgatctctgctccggcgtgagaggcgccgccctgcgctaggccggagtctgcccggcccagcccctcctcactcccttggactcttcacggtgtctccgggcccctgcacaatcctgagcgtccctcacatggaagccgaggtggtagcaggaagctggtggaaggaactggctccgcaggcagggaggtctcgcccaggaaatgctctgttggcctcggcttcctgcgcacgcagctgggcccggacccagggttggagtcgagacgtacccgggctggacgaccccgggcgttggcgcgcccgctgctgcggttcgtgctgtgctcggctcggctgtggaggaaggttggatcgaggctggaggccagaagtgcaggagccgcctcgcaggcgggaggagtcggtagccatggtctctgaaaactgggccctgtaaacaattttcaggcgccaggaacagaagaaccggcagaaacagccctagagcttgagccaaatggacggactgttggcgctgctgagggcgaaggtgcccaaactcctcaaagtggagcagcaaagcaaccaccagagatggacaagaaaaatgaaaagtcaaagaaaattagcagaaatcaaaggcagttgctaaagcagtgagaaaccgttcacgccacgatggaaaccgagttgatgaaggagtctgggaaacgaatctttttttttttgagacagagtctcactctgtcacccaggctggagtgcaatggcgtggtctcggctcactgcaacctccgcctccggggttcaagcgattctcccgcctcagcatcccgagtagctgggactacaggcgcgtgccaacacacccggctaatttttgtatttttagtagagacagggtttcactatgttggccaggccaacatacagggcaactcacttctttggttcctccaaactgaggcctcacgaaggctcaaatatggagtgagaaggactcaacaacagagcatgcaaaacaaaaaggatgaggtaggatggtcagctctaaggcttagggagtgcctgggggatgccaacataatgattgcagctataaagcttactgggtagaaataaacataaaaagctgaaaacacaatggcttgaatttggtaaaaaaacagtctctggaattgtagcagttgtgccaaaataattgagcaagaatgacatgcatctaaggattattaaggggaatgtttacaagcacacaaaaatttgttcccaaatcttattacagtggtaatattattttccgtaatgacagtttccccaagctaaagatgccatagagagactaaggcaagtgcctaatatgttgtaggcagttagtttcaaaatttaacaaacttacaatgattttatgaattcaattgaactgtttcatgtataaatttcactaaaaggcactgtctagtagctatttctctcagtttttctggaatttttctgtttcttgattccaaatcaaccttacttgattccaaatcaatcttacttgaatcccagtcatttctaaagcctcagatgtaagaacagaaaaacagcagaaatgaagccaagttaccgcaaacagtccacgtctaatacatttggcttcccacatgaaccaaaaacccccacaagctaaacaacagtgggtttaaaattcaacctaaattcaacaatagcagtcacagccatatgtaaaaattagcaaatcacaatgtagaaaactttagtctgttattgcattgttattcttaaatatctactatatttagacaagactttcaataaaaagtacttatagctaccatgtatgaattaaaacagccctgggggaaatagtattttttattaatgatgaagactgaagctccaaggatgtaaaataatttctactaggcacacagctaatgacccaaatcaagctcatatatgtttgattttaaaatttttaatgctctcactgttgacaatgttggcaaaacttttcaatcatagtttcagtgttggtgcttgggaataaatcacaagtactactgagggaggatgggtagtcaagaaagtgatcatgtccttgggatgcagcaaccacggcgattgcatggtgactgtatattgtcaacacaataagtcccagcatttgcttcgtattccagctcaatcaagcaaagctctctccaataggaaaattttcctgtaaagagcatgcacatttttattttacttgtcctcagactgacctgacctcttactcattattaatagtaaaaaaccatgcccatgggtagagatttagaatgtcatcgagacatgtgacatatgaagaagcatgtacagccactgtgtatgtgctccaagaggaacacccagaacatgcttactagtaacacctctccccttataaataattgtgtaaggctcccgtaagtggagtctccctagttcctttctttcctgtctcattcttacagcctgtcttgaatccctttctttcagggtgtactggctattctgcatctaacttttttttttttttttgaggtggagtcatgctctgtcgcccaggctggagtgcagtggcatgaactcggctcactgcaacctccgcctcccgggttcaagtgattctcctgcctccgcctcctgagtagttgggactacaggcgtgtgccaccacgtcaggctaatttttttttttttttttttttttttttagtagagaaggtatttcaccatgttagccaggctggtcctgaactcctgacctcaagcaatctgcctgcctcgccctcccaaagtgctggggttacaggtgtgagccaccacacctagcctgcacctaacttttaaaagtctttgtttcgcaataaattaccctatgctgcatctcctttgttgtgtgtctcatgtttttttgttttttaacttagaagacaaaaactgaggtctcacaacagccattaacactatcgcactttgttttgtattttttattataaacattttattctctgatatgtcaacattcacatttcaaacagccaacttatattgaagtctactatataacaatgctaaattgaaaatttaaatgatcaggtagggcgcggtggctcaggcctgtaatcccagcactttgggaggccgaggcgggcggatcacgaggtcaggagatcgagaccatcctggctaacatagtgaaaccccgtctctactaaagatagaaaaaattagccgggcgtggtggtgggtgcctatagtcccagctactccggtggctgaggcaggagaatggcgcgaacccgggaggcggagcttgcagtgagtcgagattgcgccactgcactccagcctgggcaacagagcgagactccgtttcaaaaaaaaagaaaagaaaatttaaatgatcacaaaatgatttgtcataaaagcatgtatattttacaagtttcagctttatcacactattcaatttcttaaaacaatttctgacacaaataatcaaatatttaatgatttggattcaattccaaaataatttacattcgtttattgttatatgtacttttgacaaaggtggatttgaaaactaagaaaaaactaaagcatgttcttatttttttttttttttttttttttgagacggagactcactcttgttgcccaggctggagtgcagtggggtaatctctgctcactgcaacctccgcctcccaggttcaagcaattctcctgcctcagcctcctgagtagctggaattacaggcagacgccaccacgcctggctgatttttgtgtttttagtagagacggggtttcaccatgatggccaggctggtctcgaactcctgacctcgtgtttcacccgccttggcctcccaaagtgctgggattacaagtgtgagccaccgcgccctgctaaaccatgtttttaaaggttcaagggacttaagcttagagacacaaatgctctgtagtaaaataaataaagcctcatctttttatcaataatattttaatagttttatgtctgagcacttaagcatcaagaacacgactctggatgatgttgagggaatacttaaatggataaaatagaaagtgatcatcggagtctaataagtgatggatacagcaacataatacttgacaaaaccattcagggtgtgtttgacaaacacggttacataggagctgcactgcatgattaatgtaaagtgttttgtccctaactttagtctttattctcaatcttacaaatatcacatactcacatacacagaataattaacttttttttcctggaaggcagtgtttcatcttttattatgtctgtttcacattgctgtaatgatgctgttgaagtacactctttcaccagaagattacctgtgtgaatttgaatagactgacactggataggaccagctcagcacactcacttgaactgtcttgcttttcaggcagttaaaatgcctttgaagagtgaaaatatactgactgctgattatgcagaaagttttacattaggccgggcgcggtggctcacgcctgtaatcccagcactttgggaggccgaggcgggtggatcatgaggtcaggagatcgagaccatcctggctaacaaggtgaaaccccgtctctactaaaaatacaaaaaattagccgggcgcggtggcgggcgcttgtagtcccagctactcgggaggctgaggcaggagaatggcgtgaacccgggaagcggagcttgcagtgagccgagattgcgccactgcagtccgcagtccggcctgggcgacagagcgagactccgtctcaaaaaaaaaaaaaaaaaaaaaaaaaaaagaaagttttacattaaaaaagcttgtcaattgtttgaaaattacatcgcatggcctacaacttttaaaatgtaaaatgcataaaaatactgcacaacaaaatagaaatgatggagttggccacaaaggacagccaaatctgtatatagcaatatagaaatgtatctactgtcagagtgaggtaacttgaagtatttgagagatgttctctaagaatctaaaattaattttagtttcagtgtccatgttttttaaggatttttaattttcaaaaaatgtttaaatgtgtccattgttttattcctagaaataaaaacggaaggaaaaaagaggtataaaaacaaatgaaatagaaggaagaaagtggattactcacaatagctaaggtatagaatcaacctgtgtccatcaaccagtgaatgaataaagaaattatagtatatttaccgaatggaatgatatccatttctttaaaatagaaagccttgttatttgcaacaacattgataaacctagagaacattatgctaaggaaaataaggcagcacagaataaaagtatatcacatgatctcatttctatgtagagtgtaaaaaagtttaaattcatagaagcagaaagtagaatgataattgcctggggctggaggagatgttgatcaaaaataataggtcttgtctacatctcttaagttaacaaataagttattctcctctcaaattggattaaccagggaattcaatcatacactgaagaatcaatactgaagaaataacacatttgttatagcaatgatggttgtataccgaaatttcagaggcttagcaaaataatatattctctgcttagatcaccatgccctgatggttttctttttctggttaagaggacgtcttcatgatctttcacgaataatattttctttcatcttctatctgcattctcctttcttcagcgaatggatgaaaaaaaaacgatgcagagaagacacatttgcatcttacccacacatcacttttactattaggcaaagtgggtaagcaaaataggcatatacatgaataaagtgcttgtggtaaaataatcattttgttgatttctatggagctcaggttatagatcaaaagctaccaaatataagcagaaaagagtattatttcaaataagaatactgtgaatgacattattctgtcaatagaaaaccataaccttatcctaatagtctcacctatatttgtacatcaaattctttttattaaaaattgtatttcatataaatatgcaagttatatcaccttttttttttaccatttcaatgtcttcttcactctatgttagtggaaaacaggccagctggtcccaggaatgataaagagcacttgtttgggtgatactcctgtgccaaacaccgttatttggcccaaggtactggttttctatttttctctacatttagtaataaaataaaattcttagctaagaagacttgatctcattcaaatatggtttatggaatatggctgacatttaagagtctctgacttatcttgaatattgacttttttatgaattcaaattgagtactataaataatcttttactaaaagcctttgcagagtaagattaataaaatttctttataatataaaaggaatatgttaaccatgcttccagtaatcactctgaccacagcattctcaatttccagtattcaccctgagtcactcaggggaaattggtatttgtaaacaggcagaataaggtgctgttgagtggaggtgaaccacactgcacataatgctttctacatgcacctcttaggctcttaatttaattggactgtcatttatatggctagatacctactcaacctaatcatactattttttagcagctaatgacatgtgttacccattagtcctgtacaactatttgactggctgaaaaatattttgttaatttactttaaattgagagactagatttgcgatcttcaatctttcagtgttaaagcaaatcagagaagcgcaatgcacatagaatgctccttctcttccttttccttttgttgttgttgttgttgttgttgagacggactctcgcgctgtgcaatggcgcgatctcggctcactgcaacctttgcctcccgggttcaagggattctcctgcctcagcctcccgagtagctgggattacaggtgcctgccaccacgcctaattttttaattttttgtagagacagggtttcactatgttggccaggctggtcttggactcctgacctcgtgatctgcccgcctaggcctcccaaagtgctgggattacaggggtgatagaacgcattttcctgcccaacatacttcttctttacatagaatatattccattcaaactatttagccaggattttagatttcaaaaggtcaagaacttaataattgagtgaagccaaaatattgtctttgcttcttgttagcaatctagccatttcaaaaagcacagcaattatgccaagccattgaaagcatgcagttaactttatcccatttcaaaaattgttacttttatgttaatttaagaggaactatctacataactttacatgcattcaaggaatatatatatttgctggatgcagtagctcacacctgtaatcccagcactttgggggccgaggaggtaggatcatgaggtcaggagttcgagaccagcctggctgacatggaaaagctccgtatctactaaaacgacaaaaattatctgggcataatgatgcacctctttaatcccagctactcaggaggctgaggcatgagattctcttgaacctgaggcagaggttgcagtgagccaagattgcaccactgcactctagcctgagcaacagagcaagactctgtctcaaataaattttcatattaaggtatttaatattcaatattgtatgacagtatagtggaatcctcaaaaatgagcataagtttattattaataaatttattaggccaggtgcagtggctcaagtctgtaatcccagcactttgggaggccgaagcgggtggatcacaaggtcaggagttcaagaccagcctggccaacatggcgaaaccctgtctttactaaaaatacaaaaattagctaggtgtggtggcacacctgtaatcccagctactcaggaggctgaagcagaagaatcacttgagcctggtaggtggaggctgcagtaagctgagattgcaccactgcactccagcctgggcaacagagtgaggctctgtctcaaaatacataaaataaatcaatcgataaaattattttttcaaagtttttcaattgttaaagaatcaggtatgcttttcacgataagttcaattttaggagggtacccactggtctccatgttatttctgtaatggatagtataaaactgggtcaccagaattatgcagacatgctcatttaatcagaatgagttcagcctttgtgctgtattggtatctcaggagctgatcattcactacaacttagtaaatattgctccataatcccagcaaattctttcaaccacgtttccttttttctctcattgatgtggtcatgttgtggtctcctctgtttatcttcagctatccctgatgagaggtgattatttattgcatgaatgagaccccctttttttcctcttccttgggatcctcctgccctccctactggaagcaacatgtgagaggcaggaattatgacaatatacaaacatatttcctgccaggggaccactataagaagcttacaacatgacccatctagaagtcacttacttccaggccagcaggggtgtttttctatgatgtgtctttttctcttaaaagcatctctaattaagtttagtccagtcaggataatctcccttttggtaaacacaaagtcaaaataacctaatttcatgagcaattaatttcctaccacagtaaatcacttttttttttttgagatggagtctcactctgtggtccaggctggagtgcagtggcatgatctcggctcactgcaaccttcacctcacaggttcaagtgattctcctgcctcagcctccagagtagctgggattgcaggtgccttccaccatgcttggctaattttgtattttcagtacagatggggtttcaccgtgttggccaggctggtctcgaactcctgacctcaggtgatccacctgtctctgcctcccaaagtgttgggattacaggcgtgagccaccgcgcccagccagtcacacttttttacactaaaaagataacaccgcaggtatgcaacagttgggaatcctggggatcatcttcgaattttgcttatccacctgaacagacttttcttttttttgagatggagtttcactcttgtcgcccaggttggagtgcaatagtgtgatattggctcactgcaacctccacctctcgggttcaagcgattctcctgcgtcagcctcctgagtagctgggattacaggcgcccacgaccacacccggcggttttgccacgttggccaggctggtctcgaactcctgacctcaggtgatccacccgcctgggcctcccaaactgctgggattacaggtgtgagccaccacacccagacctgaatagacttttcaaattctttcagttgcttttgttatctaagtaaacaaagatatctgcaaataatattaactacttcccaatttaattcattacaaatatcttttttctggcttaatttcttcatgtaccattttatagattcacacacacacatatataacaatgaaaatgtatccaattattctatttttgttaatttgtattataaatgagtattaaaataattcttttttgtttgaagggtttgtttgttattgtttttttttttttgagacagagtctcgccctgttccccaggctggaatgcagtggcgggatctcggctcactgcaacgtccacctcctgagttcaagcgattctcctgcctcagcctcctgggtagctgggattacaggcgcctgccaccacacccggctgacttttgggtttttagtagagacagggttacaccatgttggccaggctggtctcaacctcctgatctcaggtgatccacccacctcgccctcccaaagtgctgggattataggcgtgagccactgcgcccagcaacacagaactatttttataacatacaagtctttcaaccaataaatatttaaattatctcttaaaatgtggtacaaatacacaatggagtactattcagccttagaaaggggtaaatcctgtcatttgaaatatacatttgaagacattatgctagatggaataagcctgacacagaaagacaaatactgcataatctcatttatatgtagaatctaataaagtttaactcaaaaaaaatagaaagtgaaataatggttaccagaggcttgatgtggtgggaagaaattagagtttttgattgaagggtacaaagtttcaaatagacaaggtaagtagtttttgagatctattttacagcagcgtgactatagtaaaccacaatgtaattgtattttaaaatgactaagtaaatttcaaatgtcttaccacaaagaatgataggtaagcgagttgatagatgttatttaactcaactcaatcattccatattacatacatatattcaaatgtcacattttaccccataaattcattcaactttgatttgccaatcaaaaatactatccatactttaaagagaaataaactttaagaaatttgatgagaaaagtgttctttaaagagaaataaactttaagaaatttgatgagaaaagtgttcattttaaaatcttagaatacatacttttgcatatatatatatttcaaatggcttgctcctttaatgatgtaagtaaacttttttttttttttttgagacggagtctcactgtcacccaggctagagttcagtggcatggtctctcactgcaacctccgcctcccaggttcaagtgattctcctgcctcagcctcccgagtagctgtgattacaggcgcccgccatcatgcccagctaatttttgtaattttagtagaaactgggtttcaccatgttggccaggctgttcttgagctcctgacctcaggtgatccacctgcctcggcctcccaaagtgctgggtttacaggcatgagccaccgtgcccagccgtaagtaaacttttaatataatgaatagtctaaacccaacactcagaaataaaatgtttatttttaatgttcaaaatacaatactataaaagactctaaagcaactgcttacagtaccattatttctacgtttctaaataaattattccttcacttgttagttatttgaatatatattttaaactacatttcaacgtattaaatcaaatgaacatacgtacttggcaataaaaaatttattaaacaggtagacaagaaaacaacttgccttcttttctaattttaaaactgacaaacactcggcatttaggtgcttatttgtctagtgttactggagtgctaaagagaagtactcaatgggaaatctttccgtatttatatccatgctgggtgtgaatatatgggaattttccaagggtagtactataaacattcaactactattatatatagccccagattgactgattagaataaacatgggttacaaaccactgatgtggccaccttgtttttaggcttaacattgatcatgatctaacagaatcaacaaatgagagctatatgctgggtgctcttcgggcacctttatttgcattaattgctttaattttaccaaaatcctaaagttggggatgcaatcagtaaccagctgacaccgagtttcaatctaaccattacgcccaacaccctgtcacccaatgcttgttttaaatcctgacctaacattttggctttaaattttttaatttagtaaaaataaagataaatttacaaaccacttctttttatccatagatagtatgtagaacttaatttttggtttaaagtattcattacaaagtctgagacaaacacttcagtaagtgaattataacattattcctcttatgacttaaaagaaccattaattttacttttgaaataatgagtgtttatatttaaagttaaaatgagcctattattatatagaaaatttgttgtcagcatgaaccttgtcatccactgagtggtctacagttgctttcagaaacactaataagaatactgtttctgattgaataattaaagaatgttatgctttttcagtgactaaaataaaatagattgaaattactgattagtaacttaccatgtggtttaagtgttatttaataaatacatgtgaagtttctcttaaactcattttaacaaatgacttctgtttttcacttctattagaaaaaagtattaaaatttgttattacaagcctatcaattttattcagatctaaatatagcgctaatcttaaaagatctgtatgcttaggattataaaaagcctattctccattcacacatataagataaataactgcttttcagtaaacccaatggggcaactgtgactcacaattataagctattaaaatattaatactatcacctagatgacacttttaggtatctgcatgttcaagttgtttaacttataattcaaaaataattttttataaactataaaaaataaaaagaattttatttcttaaatattgtcattatttctagttgacttaacattcaattttagaggctgtggctttagaaacaagaaatgtcatggttgactccactttacttcctgccttatttcacacaaacacagcagcacaaaaaaggccagaaatgctacaacttgactggaaatacaccagtacctttctagggagaatatatgtgggagcatatttacttgaaattaatgacatcttttgttgaagtacaggcttctatatggcaagtaataaatacaaaaattttacagggcaaaagagtaagagatatactctaaaattaccttctaacccattatttcttttttcactagcatggttgtgacggaatgagcatttgcagcagctttttttttttttttttgagatagaatcttgctctgtcgaccagactggagtgcaatggcatgatctcagctcactgcaacctctgcctcccgggttcaagtgattcttctgcctcagcctcctgagtagctggattacaggcacgtgccaccacaccctgctaatttttgttatttttagtagagatgaggtttcaccatgttggtcaggctggtctcaaactcctgacctcgtgatctgcccgcctcggcctcccaaagtgctgggattacaggtgtgagccacggtgcccggcctgcagcacagtcttaaataacctacactctctgcttcatcatttttgagatatggccataagacatttatgattttattagaaaaaaatgtttcctttttctaattcagaaatttagcaaaatttcacaggtggatcatgaggtcaggagtttgagaccagcctgaccaacatggtgaaacctagtctctactaaaaatacaaaaattagccggatgtggtggcacgtgcctgtagtcccagctacttaggaggctgaggcagagtgcaattgtgccactgcactccagcctgagcagcagagagactccatctcaaaaaaaaaaaaaaaaaaaaagaaaattgaatctacaataactgtagtaattatactttgaaataaatttaaccaaaaagtggaaaaacctgtgcattataatctaaacaatattgaagtacaaaattaaataatacacaaatggaaaaatattacctataaatgaattagcattattattgttaaatatctgtattacacaaaataatctacagacataatgcaacctctatgaaaataccagtgacacactggtataaattttaaaacatacatctaaaatttatattgtaccacagaagacccaaagtagccaaagcaataaagaaaaaaaaaaagtgtgctttgggaggccaaggcgggtggatcacgaggtcaggagattgaaaccatcctgactaacacggtgaaaccccgtctctactaaaaatacaaaaatttatctgggcgtggtgtcgggcgcctgtagtcccagctactcgggcggctgaggcagaatggcgtgaacctgggaggcggagccgattgtgccactgcactccagcctgggagaaagtgcgaaacttcgtcttaaaacaaaaaaacaaagaacaaaacaaaaaagggtgaagatatcaccctacctgactttgaaatatactaaaaaagctatattagctaaaacagtatggtaattgaagaaaaacagacacatactccaatggagcaggaaccaaaaaaaagacaagaaacggctgatttgaagttacaactaagcccagcagtaatatttatggcttattacggagcatcagttacgcagcaaacactctcatgtttcttttttttttttttgagaaggagtctcgctttgtcacccaggctggaatgcggtggagccatctcagctcactgcaacctccgcctcctgggattaagcaattctcctgctgcagcctcccgaatagctgagatttcaggcacgtgtcaccacacagctaatttttgtatttttagtagagatggggttgtgccatgtttgccaggctggtcttgaactcctgacctcaggtgatctgcccaccttggcctcccaaagtgcagggattacaagcatgagccaccatacctggcctcactgccatgtttcttttgatacatttatatatataaacattctcatgacttatgaaacttccctagtacttacctaaaaaaaaaaaaagactcaataaataagtaaattcacttatgtcatctataaaaagtaaaaggacaataactaaagaaaagtaggcttatataggcatctgcaactaaaagaacaaaatggaatgttctaaataaaatacattaattatggaattacttctaaaaattatgtgcactactgaattttataaaaaacattcttataatcacgaccaactcatgtaatggatacttcataaactataaaacaaaaaattataacaagaaaattataggtctggcatgagtgccaggcaaagagtttgtatggcgagattctgaaccttaagccataaggttttacagtaatgaatttaatacaaagctgagagcataaatttgctttcagcatttttgaggtttttactagctagcaaattaatcaccttattaaaatgatttgttccgatattgctctattcttctgaaaataggtacaaactcatgctcatacaaacacactcactccataattttctttcctaaggtttagagtaatacatgcatatttttaactttatgtaaatcaaaattaaaagtctgtgtgtttgcaggcagagaggccacatgttcaaataaaaatatataagaaatttattaaaatacgtattcaagactcacaaatgtatgcattttattcatacttctaaataatataatcatagaaattaccctgtagtcaatgtctatttatttattcattttgagacaaagtctcgctctgccacccaggctggagtgcagtggcacgatctcagctcaccacaacctccacctcccaagttcaagagattctcctgcctcagactcctgagtaactgggattacaggcactcaccaccgtgcctggctaacttttctatttatagtacagacactgtttcaacatgttggcaacgctggtcttgaactcctgacctcaggtgatccacctgtctcagcctcccaaagtgctaggattactgacatgagccacggtgtccggccgtcagtaacagtttagttgtacattttaaactaacaaaaagtgtaaaattaaattttctgtaatacaaaggataaatgctagaggtgaggcagtcagtaacagtttagtcgtacattttaaagtaacaaaaagtgtaaaattaaattttctgtaatacaaaggataaatgctagaggtgatagatacctaatttaccatgaggtgattattatatattgtatgtatgtatcaaaatatgccatatgtggtttaaatatatacacatactatgtacccaaaaatattaagtaaatttaaatgagaaagaaaaaataaaaacttaacatacaggaacaacattctttaacttctttgcagtttaaagccactagcaaaaaagattactacaaatactactttattatgttaacaaataatatattgttaccatcttttacctacactctaaggtggaatgggttaaggttagcggcaaaataatgcttcattgaatgcacaatagtatttaacgtgttaaaaacgttaaattaaaaagttaagtctacacataatttcaaagttttaaaatgtactggattgtatcacataaaagtacaattagtaaaataatacactattaaattttaactaaaattaaaaatatttttctctcataatgtagagtattaaactgaacacctacttcatgcattgctcaatattataagttaatcacaaagagcatccctacttagattttcatcatacatcttacattttaatgtctttactctttcatagaagagagaatatataacgcccacctaataaaaaagaatctctcatatctttcatgcaggaacaattcatcacatactttcacatgtgaatacaataggaataaagaaacagcatgaatttgagagttgaattacatcattattcacgtatttaaaaagtctataaaattttttcaagaaaaaagtatactttggtggacacagtggctcacgcctgtaatcccagcactttgggaggctgagccaggtggatcacctgaggtcaggggttcaagacaacctgcccaatggccaagaccccatctctactaaaaatacaaaaattagccaggcatggtagctcatgcctgtcatcccagctacttgggaggctgaagcaggagagtcacttgaactgggaggcggaggctgcactccaacctgggtgacagagcaagactttgtctaaaaaaaaaaaaaaaaaaaaaaaaaacaaaagtaaagcctgaccaacatggtgaaaccgtctctactaaaaatactaaaaattagcaaggcatggtggtgcacgcctgtaatcccagctactcagaaggctgaggcaggagaatcacctgaacctgggaggtggaggttgcagtgagccgagatagcaccactgcactccatcctgcacgatgggaacaagactccatctcaaaaaaaaaaaaaaatgtaatttgaatgtaataactctccaaaatatcttatacactttttaaagttatatacaaaatatttatgtacaaacttcagttctcaattattttctaaactcagccctctgatttagtgtactgtctgaagtgtcagttccttagatatacctactctgaattgacatttacagacttaattttttcaaataattttttatattactgcatctgcaaaaacatattttagtatgaactctctggtgtttcctaggctgtagtttgtaaaaaaatgtttttccaaatttactacctttgcagagattttcttcaagataaattatctgatgttgaagaaagctggagcaactacttcagggttttcctctagaacaaaatgtgtaaaataagatctgtaatacaagtaatggtaccacaacactcttcatattagtttttttttttctttgagatggagtgcagctggagtgcccaggctggagtgtggtggcacaaactcagctcactgcaacctctgcctcccaggttcaagcgattctcctgtctcaaccaccgagtagctgggattagtcatgcactaccacacccacctaatttttgtattttgggtagagatggagtttcaccatgttggccaggctggtcttgaacttctgacctcaagtaaaccacctgccttggcctccaaagtgctgaaattacaggcctgagccaccatgcccagcttacactcttgatattttaatgcttgtcttcaaaataaatactcttcttcactttaaaggcttatattttctgaaaaatctattgacagtaatttcatctttaatgcttctattaagtatgaactctctgatattgaataagatgtgaacagatattaatggcttcttcacattctttacatttgcataatttttctcaagtatacatcatttcctgtccaataaagtgtcagcattggttaaaagttttgccacattcttcacacttgtagaggtttcctctactatattttacctacaatcaagtatgacaaccatttaaaggtgtttagaaatattgaggtgttgtcaactgcactgttatatctttcaggtttgtacggtttctctccagtaattctcttcgttggccaggatggtctcaatctcttgatcttgtgatccacccgccttggcctcccaaagtgctgggattacaggtgtgagccaccacgcctggtccatttttcttatttgtcagatttttctacagcatgaattttcttgtgtgtagtaaggtttgagcattggttaaaagctttgccacattctttacatttgtagggtttctctccagtatgaattaccttatgtttagtcagagttgaggaccaattaaaggctttgccacattcttcacatttgtagggtttctctccagtatgaattatcttatgttgagtaaggtttgagtattggtaaaaagctttgccacattcttcacatttgtagggtttctctccagcatgaattatcttatgtctagcaagtgtcgaggattggttaaaagctttgccacattctttacatttgtagggtttctctccagtatgaattttcttatgtgttgtaaggtgtgaggataggttaaaagctttgccacattcttcacatttgtagggtttctctccagtatgaattatcctatgttcagtaaggtttgaggaccgcttaaaagctttgccacattctttacatttgtagggtttctctccagtatgaattatcttatgtgtagtaagttgtgagaactggttaaaggctttgccacattcttcacatttgtagggtttctctccggtatgaattcttttatgtgtggtgaggtgtgaggatgtgttaaaggctttgccacattcttcacatttgtatggtttttctccagtatgaattctcttatgttgagtaagagttgaggacacgttaaaggctttgccacactcttcacatttgtaaggtttctctccagtatgaattctcttatgttgagtaagggttgaggacacattaaaggctttgccacattcttcacatttataaggtttatcaccagtatgaattctcttatgtttagtaaggttcgaggattggttaaaagctctgccacaatgttcacatatgtagggcttctctccagcatgaattatcttatgtctagtaagggttgatgattggttaaaagctttgccacattctttacatttgtaggcattctctccagtatgaattatcttatgtgtagtaaggtgtgaggatatgttaaaagcttttccacattcttcacgtttgtaggatttctctccagtatgaattatcttatgtgtgttaaggtgtgaggacttgttaaaggctatgccacattcttcacatttgtagtgtttttgtcctgtatgaattctcttatgttgagaaagggttgaggacacattaaaggccttgccacattcttcaagtttgtaggaattgacagtagtgtgaattcttttatgttgagttaggtgtgaaagaacacaaaatgacttgccacattctttacatttgaaaggattcttttcagtcttatgtctatttgaatttgaaaatttatgaaagtctttcacatatttatcacactgaaatattttgctctgggtagttgtcaaacactggttaaatccattataacttcctttgtgcaccttgtactcatccacacttttatagcctttttttaactgtaaattgtgatgtccacatttttcatattttctcagtattattctttgcaaagaagcttttatgctctgctctggccgaaggtcttgggcaaaataacaacacatacctgaaagaaataaaaataacaacttactccacatactagactcagatacatattctttacacatctaacctacaaaactatacaaactacataaacaagattgcataagaaggccaggcatggtagctaatgcctgtactcccagcacgttgaaaggctgagatgggcagatcacctgaagtcaggagtttgagaccagtctggccaactggtgagacccatctttactaaaaaatacaaaaaaattagccgggcatgatagcatgcacctgtaatcccagctactcaggaggctgaggcagaagaatcgcttgaacctgagcggcagaagttgcagtgagctgatatcacaccaaggcactccacgctggagaacagagcaagactttgactcaaaaaacaaacaaacaaacaaaaaactgcataacaaaataccaaagaccctaatttccttatagacatataaatataagaaaaatacacagaccaaaatacatttgtgaaaaatttataaatgagttaagtgtgtacagtgccccaggaggtgagtacaatgcaaagagccacaaagaaaaagagaaaagtctgttatatttacctaacacagctcatccctctccccaatataatatagtgcctttagaagtgaacacccagccaggcagggtggctcaggcctgtaatcccaacactttggcgtgccgggtgggccgatcacctgaggtcaggagtttggaaccaccccggccaatatggcgaaaccccgtctctactaaaaacacaaaaattagccaggtgtggtggtgggcacctgtagtcccagctacttgggaggctaaggcaggagaatcgcttgaacctgggaggcagatgttgcagtgagccgagatcacaccactgcactccagcctgggcaacagagcaagactccgtctcaaacaaaaaaacaaacaaacaacaacaacaaaaaaaaaaccccaccaaatctgttgacaatgctatgaaaatgaaacttatgttgattgttgatggaaaccaaggatgcagccattattttaaaatgttatgtttcacacataattaaaaatagaattataattaaatacagcaatcccatttattaatctatatccaaagtatgcaacacaggacctagaagagatatgtaaacatctatctttattgtaccagcattcacaaaagccaaaaggctgaagtaacccagatgtcttttgattcataaacgtatcaaaaaatgtgacatatacatacaatggaattttattcagccttaaaaaaatcgtggccgtgcatagtggctcacatttgtaatcctagcactttgggaggcagaagcgggtggatcacctgaggtcaggagttccagaccagcccgggcaacatggtgaaaccccatttctataggatacaaaaaaatttatccgggcatgatggtgggtgcctgtattccccactactcaggaggctgaggtggcagaattgcctgaacctgggaggcggaggttccaatgagccgagatagcaccattgcactccagcctgggcaacaaagcaagactccgtctcaaaaaacaaaaaacaaacaaaaaccacttgtaaaattctaagataaactttgagaatattttatcacctaaaataagacagtaacagaatgatgcatactatatgattccacttatatgagatatgttataaagagtcacactcataaaaacaaagtagaagagtgtttgtcaagggctgaggagaggggaaaatgggcagttgttacttaatggatattgagttttcattttacagatgaaaaatttctagaagtgttttgcataaccaggtgaatatactgtcacccaagctgaaatacagtggcaagattatggcttactgtagcctcaaactcccagcctcaagtaatcctaccccttcaattccccaagctgctaggaccacaggcgcaccccaccccatgcctggttatttttgaaaaaaattttctagagagagggtctttttttttttttttttttgagatggagtctcgctctgtcccccaggctggagtgcagtggctgaatctcggctcactgcaagctctacctcctgggttcacgccattctcctgcctcagcctcccaaaaagctgggactacaggcgccctccaccatgccaggctagttttttgtatttttagtagagacaaggtttcactgtgttagccacaatggtctcgacctcctgacctcgtgatctgcccacctcggcctcccaaagtgctgggattacaggcgtgagccaccacgcccagcccgagagagggtctttacgggtgggccaggcttgtctcaaacttttgggctaaagtgattctcttgtcttggcctctcaaaatcctggaattacagatgtgagccaccaccatgcatagtcctaatatgtacacttaaatagatttaagatggtaaattttatgtcatctgtttttacaacaattttgtagaagaagaaccgaaaaaagtaaagaattatgaatcttttcaaaaattaacttcaaataacaaaagtgatctgaaaggaacacaaaggaaatgtacattcattattaaacacagtgtagaaataagattattttcacaactactcacttatataagacaaaacaaccactgaaaacagctaagaaaaaatatatacaagataggccataaccataattagggtcatatttataaataaaaaacacacacatatataatctgattgtgatagacatatagctcatttatttcttaattaagccctatgttgacttaaagtgtacagagttacaaattgtctaaaattttaatatgtaagtaaaaccaaaaacacaatagattcattttaagaaaccaacactaaaaaaaacacataaagaactgcaaaataataagggaaatgtttactcaaactctggtaagcaacattaatggaccattaaaaaagaatttgtctagataactacaatatttgactgtaactgtgtactcatggaaggcaggtattatgaatcactggcattaactatatggtagttaaaatttcagagaaaatgcagtataaccataaatagaagactctaatgagaaacttttaataaataagcattataaaaactagaggtagttttcatgttttaaatgtatgttattcttatacaaaatgaaactgctgtaattcaaatttagaagcaggccaggcgtggtggctcacgcctgtaatcccagcactttgggaggccaaggcaggtggatcacttgaggtcaggagttcgagaccagcctggccaacatgatgaaaccccatctctactaaaaatacaaaaaactagccaggcgtggtggtgcatgtctgtaatcccagctacttgggaggctgaggcagaagaatcacttgaacccaggaggtggaggttgcagtgagccgagatcatgccattgcactccagcctgggcaacagagtgaggctccatctcaaaaaaaaaaaaaaacaaaaaaaaacaagttaaattatattgctaaattaaaaagaaataaatatatttttgcagaatataattaaagcctctgatatataaaacaaatatttgggaataaattatgtttttatttagatatagtctgaagaaagtgggtgcaaatcctgtaattcctatttgcctgcagcaaacaaatgtataagtaactattttagtaaatatggagtgcctactaagtatctaatttacttcaggcataacatttaaattctgacatatgtgtcaatctaaaattaattctgacatatgtgtcaatctaaaattacagacaaatttgaaatagaaaatagaaaaatgaatagagtgacattagtttgacggaaaaataaaaggtgacctattttcttaacccgacagcaagaaaatttgtcaggaattcctgacaaaaatgcctttatgagagagccaagcatcatgtctcacacctgtaatgacagctatatggtacactgaggttggagaatttcttcaggccaaaatttcaagaccagcttggggtatatagcaagtcctcatctccaaaataagtgcctttaagagagctttaaaggccgagtgtggtggctcacgcctgtaattccagcactttgggaggctgagacaggtgggtcacctgaggtcaggagttcgagaccagcctggccaacatggtgaaacactttccctactaaaaatacaaaaattagccaggcgtggtggcgcatgcctgtaatcccagctactcgggaggctgagacagcagaattgatcgaacccagccgggaggcagaggttgcagtgagccaagatcgggccactgcactccagcctgggtgacagagatgagacttcgtctcaaaaaaaaaaaaaaaggctgggcgcagtggcttatgcctgtaatctcagcactttgggggactgaggcgggtgtcgatcatctgaggtcaaggaattcgagaccagcctggccaacatggcgaaaccctgtctctactaaaaatacaaaaattatccaggcatggccgggcacgatggctcacacctgtaatcccagcactttgggaggctaaggcgggaggatcacctgaggtcaggagtttgagaccagctggccaacatcgtgaaaccccgtctctactaaaaatacaaaaattagccaggtgtggtagcatgtaccagctgcttgggaggctgaggcaggagaatcgcttgaacctgggaggaggacgttgcagtgagctgcgattgagccactgcactccagcctgggcgacagagcgagactccaagccccacttccaaaaaaaaaaaaaaaaattttccgggcatggtggcgcgtgcttataatcccagctactggggggctgaggtaggaggatcacctgaacctgggaggcggaggttacagtgagttgagatggtgccactgcactccagtctgaggaacagagtgagactccgtctcaaaagaaaaaaaaaaagagagattgagagagagagctttgagatccagggagggagttgtgaaactctgataatgcccaagactgaggagcatccttttcagaaggcaggcattcattcaggtggtaaactacaggacctctgttcttggctacagactgaaaaatagcctacccaacttggtcccactgagaatactgaacttaccccgtaaccatctcaaactcctcccagtcacagtctgggagaggtcctgcccttccagaggcctggaggaagacacccatttatagccatgcaggcaggtttgcaagaccttagcctttactgtggtccctgaagcagttccatgactcagttcaaggccagttctgcctacacagaaacctacacagtgacctggcaaaatcctctttgatactaagtgaaagccatactcattcacatcctgatgtaaggctcaccatatgcagacctgactacagaaacctgcctagtgtctgccctacagatcaaagtcctgaaggatattcagcctgtccaaaaataaaatgcaaattacaactacacaatccccttgtaacaaggcaactaaaggtaaacccttgtgcagacatagcagccttgtgagcaacctacaacccctcttcattacaaacccatagggcatcccattatcctgggtgcccaacaaaagatcttttacctcctgtaaccagtttataaaaacttgaagaggtgtttgtttcttgaaattcacagacaccagtgcaaaactatattgtgcccagtgtcaatgcttctattttaaaatagcactggaagtatgtagcagaataattagaacaacttttaaaaagccattaaaattgaagacaaataggtaaaaagttgctgtttgtagatcatataatctcatatataaaaaatcatacacagtacatttaaacaggtctaaactaattaatatactcagtaaattagcaaaatataaaattaacatacatttataagatacggttccataaacttaaactatctgataaaataaaggaggaaaacaatcttattgataatagcattaaaataataaatttcttagaacaaatttaaccaaggatctaaaaagcctttacaataaatgatgtatcaatggaggaaattagaaaagacacaaattttaaaatattttgtgtgtatggattgaaagaataaatattgttaaagtgccatattatccaaagtgatctacagatttaataaactccctatcaaaattccagtggtatttgttttcatagtaatgaaaaacacaatcataaaatttacttgaaacttcaataaactctgaataatgaaagcaatcttgaggaaaaagaacaaaggatgaggacaacgtactttataatttcaaactatatttcaagactatagtataaaaacaggaaggaatgtgcagaaaaaatgaacaaaaaaaatgaaacagaaaccactactctcacatatttcagacatgatgtagaaagaaaacttaatagtttaacacagagtttcttaaaatttcacagatatttatgtgtccaccaaaacattaaaaaagcagattttgtagtcttgtatatgccaaaaaggggactttggttctcactgaaaacttgaagaaagataacggaagggaaagtatattccttagaaaagttagaaggataagacaaaagatacccctatgtaagagaaaaaataaaataaactattttattttcccagaaactattttccttggagcacaactcccaaattgtatttcttatttttattcgtttatttatttatttatctgagacggagtttcgctcttgttgcccaggctgcagtgcaatggcgcgatctcagctcaccacaacctctgcctcccaggttcaagcgattctcctgcctcagcctcccaagtagctgggactacaggcatgcgccaccacacccagctaattttgtatttttagtaaagacggggtttctccatgttggtcaggctggtctcgaacacccgaccttaggtcatctgcccgccttagcctctccaagtgctgggattacaggcatgagccaccacacctggccccaaatcgtatttcaaaaactgactttctccttgacatttggacctctcatctgtgtcatctgtcatattcactctcacctacctgggggtttggccaccatctcatgtctctccatattccagggctctttgccttgctccagacaggtgatcaggtctggcttagagacagcaatacctgttttattaaaaataaataacatgaatgttgctcatattctttaaataatgtgctcagtaaaaagggtgtaattaatagaatactaaattaattacaaaatacaaatttaaaacaaatttctaaatatttagacactattttaaatttgtaggtccttaattttactacttagtagtactgaatcaaaaactggagatgacaattagattttaaggtatagaaaacaatattttatgccactaaatttctggaattaccactaatttagagtgaaggatacagatcagctcaggaatataaaaagtccagatcacaatgaaacatcttgaatttttttttttctacattgacaaatccccaagattttctttctctccctttttttttgagatggagtctcactctgccacccaggctggagtacagtggtacgatctcggctcactgcaacctccatctcccgggttcaagtgattctcctgcctcagcctcccaagtagctgggactacaggcgtgcaccactacacctggctaatttttttatttttttaagtagaggtggggtttcaccatgttggccaggctggtcttgaactcctgacctcaggtgatccacccgccttggccacccaaagtgctaggattacaggcataagccaccacgcttggcccccaagattttcttagaaatagagatctgatactcatttatgcaaagatcaattaccaaaaaacatcctacaaaaaaacaaacgaaatatttagggtagattaggaattgtgtattgaagttattctcacccaggaagaccaggtttctgtagttctctaacatcacgttcctatataaattctgctgtgcagtgtccaggcattgccactcctccacagagaattctatggccacatccataaatgtcaatggtccctgaaaagtacacacacacatatttacgaagtggccatgggcaaaatttttaatttgattcaagttgaaatgaaagactaaggagtactcattctgacttataaaagtgaatgaaattatccaaatgaagtaattttaaagacagaaatattctctgatgtactctctaactctgagaaaagactagaataagatccacaacatcaatttatatatgatacttttctggataataaaatataaaattaaggacatgaacacaggcatgtacattctggagtgctatattcacactataaagaatgagttctgttgagatgaaagacatgtcgagttacaaggtacatctcaaattttaatgtgtacaataaactggaaatcttgttatgctttttttttttttgcagaagatctggaataaagtctgagttgctgaatttttaataagctcacaagtaatgccaatgattttgccccaaagaaaaatattttatcaaacatccaacaagtgaaataacctgtttttccccccagtttttatggcctataagagagagatgacagccttcattttccaaaaacagatatatgcaaagaaaccctaagaaagaagagcagctgtcagattacatttgataatttatacaaatcagctgcacaaagatacttaataatgaagaaaaaataattaactgtatagtgaaaaaatctgtcagacagctctttaaccaagtgaatcattagcctcaactgcactaggacaaatttttacggtgtgctaaaacacacagaaggacacacagcatcactgctggaatattgttcccaataagtaaattatagtctaaattcaaccatatggaaacatcagttttatgcaaagttcaagatacaggtatcttctatcttgatacaggatatcttaagatacaggaatcttctattcaagatacctgtatcttctatgttctgtaatttttaatagtgattttaagtagtctttctttagcaccctagagaacaggtatctcctgataatttttttcagaactttctgagtaataaatgccatcctgtttaaataagcattttcttaattcggttctgcatagggctaatagcaaacacaaatggaacttcaacattacatgttctccatctttactaaggatcccagcttttccccaatagtaatcttgagtatccacacttttctaagttcaacagccacaaaaagaacacttttaatactgcagatcataaattaatggtgataattttgcaaggcatataaaaagccaaaatgtaaaaaatttagagaaggctctggtatataggaaagaaatatttttcttgattatcataagaattttaaaaagtagttaaaacaaactcattagggagaaaaaaacacaagtatagaagtcaaggtttgcaagtactaaacacacagcattccggaggcagggcggatacagctcttgatccgagacatgtttagctgaaaaaaaaaaaaatgccactttttcctctatctcctccttctcttggatttattttcagatgagattttctggacaaattacacctgcatcttgagaaaatgccacctgtttacatgctacgaccacacccacaggcagaaggaccaagaccctcagaaaaagtccacccatttctgggtgaatcttcagaaaagattcagaaacaatgaagagaaaaatagaagtttctcctttcctgtccttaggtaccctccccaccaaagacaccagcaatttctgctacaataatggaaatatgggccacgctgccctgtctttaccaaacccaaacagaacaggccctgtgaccatccttcagtggaaaagtaaaacttaactctcatgaatgtatcttgaacccctcatagttgattctggccttaccttagagtcacatgaggcacttaattaaaacaacataaatgtgtccacacaaaacaataaacagaacctgtgaagaaggcacaagtaaagggatttctaataattagccatgtaatttgagtgcctacacctaagtaatccaagttacttagaatggcaaaaacgtcaattaacttttccaccaacctaatagaagtccagctgataaccatttagctaagcattgccttgcaattttttttttttttagacggtgttttgctcttgtcatccaggctggagtgcaatggcacaatctctgctcaccacaacctccacctcctgggttaaagagattctccagcctcagcctcccaagtagctgagattacaggcatctgccaccatgcccagctaatttttgtacttttagtagagacgggattttaccatgttggacaggctgctctggaactcctgacatcaggtgatccacccacctcggtctcccaaagtgctgggattacaggcataagccaccacgcccagctgccttgtaatatttaataagcttataaatcacttggtaactttggaccttccctatgtattttgattctgcaggttttcaaagggttcatgaatgtgcgttttaaataagtcccctgtcaatgctgatgttgcttcttctaggctcatcattagaattggttagagaagcaggcacagtacagagtcccttacactcagcactcttgtcacaacacaaatacttccggcacaaatgaagacaacaaatctccatctttaagtatcatattctttgctggttctttaaagtttacagaggcaacagaaagtagcaatgcctgaataagtctgcacttcgaaaacaacatgtactattgaaatgtttataaagcaggtactatgtgctcaagagtatgttacagagcactgtgcttggaataacacattatgtgatttaattctcataacaaactgggagtcagcacagctgtttaataattcccaggatttagattaaggcttagcatttttatttcatcttctgtttctctgtccttggtttttttaaaaaatgtatagaacactaaatatagacagatgacagggatacagaaaggaagaatttaatgtagtttaaagaaatttttattgtgttcatatttacttgtttgtgacttgtggagcaactactggatctgcagaatagaaaacaagttgctaaatgtccctgcaagcactggtttaatagaaaatttaaaaattaagatgctaaaatacatactttatttttccaattttatctgcttttgggtttcagaaaattgtgagcaccagctctaaaaatttaacagactcactagtcaaaacttccaatcagttctgtgaggccagacttcaaggtggggccagaccgaaataagaagtaaaatagctgattgctaccctgtgaagtttgtagaaatctgaagtgactggaagcctgagaggaaaaggcccctctagagtaaagtttggctggaaccatatgtgttcatatcacctctagtaattctagacagtgtttggaaaatataattaaaagaaaaaatttctccagccctagagaaactccaaaatgatagaacagaaagtaaactgtttcattacacaattaaaccagaatgtgacatgcatcacagtcaatcttcttaagagattgcaaagacaaaaagacactcccataattagtccacaagtaaaagaatttatagcaccatgtaatacatggttcatcctaaattcacctggtaatgggggaggtgatccatgtatgctaattggttataatcaatgacaaaattaacttttcacatcctcatgacaggaggtaattttgcaacttagggagttatctttttggctatttacattttaagcaatcaatggctctgtactccctgagcactatactctgcttgccctttcctgatagccagtgtcctttcttgactcctaccacagggctcacagctggcagctcacatcttacacgaaccccaactgccagagcagcactccagtcccacatcaggtaatgaagcctgagccagccctcctggctgaaattgcaccttcacgataatgggaatgggagcagtgtttcagcttcagtttctatttataatagtgacatgaaaaaaatactgctggattttcagcatcagtccgcatagagatacctctaagagttctccctgtgacagcccaactcattcatgacaccatgggatagtaatagagcttctgaaacagacacccaaagcattggagagaaaaatcgctcttcatcttagtaaaattatactcagtaaaaaagaagaacatcttaaaaaaacactcagattagatataagattgatcatgttggccagaaaatgttcccctaaaataaacgtctctctaaacacccaaactgcacagctactctcagcatgagaagcatgagcattatgaagaaaggggacatattctcagcaaaattttataaagtttctcttttatctctgttgctctctcgtctcctagccattaaatggaggatttatattggaatacatctgacaatttccaacagctcctttttatttttattttttttttgagacagagtcttgctttctcacatatgctggagtgcagtggcatgaccttagctcactgcaatctccaccttccaagtttaagcgattctccttcctcagtctcctgagtagctagaattacaggcacccaccaccaccccccgctaatttttgtatttttagtagagacagggtttcaccatattagccaggctggtctcaaactcctgacctcaagtgatctgtccaccttggcctcccaaagtgctgggattacagaggtgagccacagcacccagccttcaccaacgttttttgatgaagaatcagaatctgactttgtttatatagtaaaatatatttgagcttacaacacagctaacttaaaagctattatatttcttgcatggtcacatcacccatcacatttatttgtactgtaatagcagtattcgagtttagtaaaataaaagatactgaaatcatgcttacctatatctattgggtaaattaatatgcatgtcaggctaatatctactgtaacaattttgtagtgaatttttttggatattagatataaatatctaagcataaataattttaatgtactagtaataatgtagaattttaaaaaattttctgtaaccataatttagttataatactttatatttcaaaagtatgacgaatattaaaatgactaagacattcatccaaaataaatattgtggtcttatattcataatattgtagaaaataccgtataatttaggtcgggcgcagtggctcatgcccgtaatcccagctactcagccgagatcacgccactgcactccagcatgggcaacagagcaagaacccgtcttaaaaaaaaaaaaaaaagaaaatactgtataattcacacaaatgcaagttgtctacaaacactacacataaccatgctaattgttttgaagcagtaaataggaaccaaagcataaccaaagactccactgttgagtttatacactgaactgttctttcttttgcagtgtaagtacttcagcctgcaaatattggataattacactggataatcagttttttgtcaaagaaacttcctctgcatcttttagtctttatcattctgtattgctaagtttaatcctatctttgtgctccactttttgtgtgctcttaaaatgagctttaatctagacaaatctgtatctactttaagagactgaaaacaacaacaacaacaacaacaaaaccttgtaatcccagcactttgggaggccgaggtgggcggatcacgaggtcaggagatggagaccatcctggctaacacggtgaaaccccatctctactaaaaatacaaaaaattagccgcatgtggtggtgggcgcctgtagtaccagctgcttgggaggctgaggcaggagaatggcgtgaacccgggaggcagagcttgcaatgagcccagatcacgccaatgcactccagcctggaagcgagactccacctcaaaaaacaaaaaacaaaaaaacctttgccaaagcaaaaacactgcaatggttctgaggtcctagataaagacaatcctgagtcagaaagaatgacaaaaggtttctttagctgtaaatatgatttacatatatttcagaaaagcagagaatatctacatataagcaaaatgcttcaataaagagagatgaacaaaatatcctccctttttataaggtaagaaaataaagactcttatttctaatttatattttctcctataaaagccaaatctcgaccaggcatggtagctcatgcctgtaatctctgcactctacgaggccgaggtggttagatcacttgaggtcagaagaccagcctggccatcatggcgaaaccctgtctctactaaaaataaaaaattagccgggcgtggtggcatgcacctgtaatcccactactcaggaggctgaggcagaagaatcacttgaacccaggaggcagaggttgcagtgagctgagatcgtgccactgcactccagcctgggcgtcagagtgagactccatctcaaaaaacaaaaacagctaaatctctggacaagttcttgatctcttggacatctgaatttcagcagactgtaggttcaggcatctaaggagtagccttgggcacactaaagaaaaaagcagaagagagaaaggtgttctaaaaaaatccatgagtgcatatgaataaagcaagttcttacggagagctatgaagagagttggattctgacacaataatagtgggagactacaacaccccacagacactattacatcattgaagcaaaaaaattaacaaagatatcaggacctaaactcaacatttgaccaaatagtcctaactggcatctatagaactgtccaactgaaatcaacatagtatacattcttctcatcaccacgtcacatactctaaaattgaccacacaatcagaaataaaacaatcctcagcaaattcaattttcccaaagtcataccaaacacacacttaggccacagctttgtaacgatataattcaatacaaagaaaaccacttcaaattatccaattacatggaaatttaaaaaccttcacctgaatgacttttgggtaaataataaaattaagcagaaatcaataagttctttgaaacaaataagaagaacaaagatacacaaaccagaatcgctacaacacagccaaggcagtgttaagaaggaaatttatagcactaactactcacatcaaaaacttagaaatcaatttaaatacctaactctactaaaaatacaaaaattagccagtcatgggggcactcgcctgtaatctcagctactcgggaggctgaggcaggagaatcccttgaacccaggagacagaggttgcagcgagccaagattgttccattgtactccaggctaggcaacgcagcgagactgtttcaatcaatcaataaagcaagagaaaaccaattcccaagctagcagaagacaagaaataaccaaaattagatctgaactgaaggagatttagaaatgaaaagtcatagaaaatatcaagtaatccaggagttaaatatttgaaaaaaattaagaagataaaccgctagcaagattagcaaagaaagaagatccaaataagcacaattaaaaatgacaacagggggccaggtgccgtgactcatgcctgtaatcctagcactttggaaggccaaggaaggtggatcacctgaggtcaggagtttgagaccaaccagcctggtcaacatggtgaaaccccctctgtactaaaaatacaaaaattacccaggcgaggtggtgcatgcctgtagtcccacctacctgggaggctgaggcaagccaattacttgaacgcaggaggtggaggctgcctgggcaacagagcgagactctgtcaaaaaaaaaaaaaaaaaaagataaggacaaaacccaaaaaggatgaaaactgagaatggcactaaggcccagagttttggtcgcactctgaccaaaaaatgagaatggcactaaggcccagagttttggtcgcactctgaccaaaaaaggagacagttttaaacaaaattattggacgacattattctggactgagcttgtgcactaggtccaaacagacaaacctaaccaaaatggagtcactgatgcttaaatgtgacataatggaactgaacatttaaggaaagtggtagatgctaaaacaggccaggttttgtctgtcttttgtaaacagcagatttaagcacataattgcttaaaccaggaaggcgaaggttgcggtaatctgagatcattccaccgcactccagcctaggtgacagagtggattccacctaaaaaaaaaaaaaaaaaaaaaatggcaacagaggccaagcacagtggttcatgcctgtaatcccagcactttgggaggccgaggcaggtggatcacctgaggtcaggagttcaaaaccagcctgaccaacatggtgaaaccctgtatctactaaaaatacaaaaattaggccaggtgtggcggcatatgcctgtaatcccagctacttgaaaggctgaggtaggaaaattgcttaaaccccggaggcagaggttgcagtgagccaagatcacgccagtgcactccaacctgggcaacagagcaagactccatctcaacaacaacaacaacaacaacaaaaaaaaaagactacagagacattacctctgaccccacaaaaatacaaatagctattgaagtttactatagacacctctgtacacaaaaactagaaaatctaaaggaagtggataaatttctagacaaacaaattctctcaagaccaaacaagttgaagccctaaatagatcaataacaagctccaaaattaagttagtagtaaataggctaccaactaaaaaaacccaagaccagaaggttcacagctgaattctaccaagtataaaaagaaaagctgatataatgccttttaaaactattacaaaaaattaagaagggacttctccccagctcattatataatagcatcattctgataccaaaacctggcagagacaaaacaacccagaagaaaacctcaggctaatatccttgatgaacattgctgcaaaaatcctcaacaaaatatgggcaaaccaaatccagcagcacatcaaaaagctaatctactataaccaagtaggctttatcgctggaatgcaaggttggttcaacatacaaaaatatcaataaatctgattcacataaacagaactaaagaaccacaaaattatctcaatagatgcagaaaaaacttccaataaaatgtaacattgttcatgcataaaaccctcaacaaactaagcattgaagatacatacttcaaaataatgagttatctatgacaaatccaaagccaacatactaaatggacacaagctggaagcattccttctgaaaactggcacaagataaggatgccttttcttaccgctcttattcaacagagaattggaagtcctggctagagaaatcaggcaagagaaagaaagaaaatgcacccaaacaggaagggaggaaatcaaactatccctgttttcagatgacatgattcagtatctagaaaaccctagttttggcagaaatgctctataaactgacaacttctgcaaagtttcaaaatacaaaacaaaggtgcagaaataagtagcacctctatacatcaacatacaagccaaaagccaaatcaaaaacacaatcacattcaaaaatgccacaaaaagaataaggtatctaggaatacagctaaccagggaagtgaaagatctctacgacaacaattacaaaacactgctcaaagaagtcagagatgacacaaacaaatgcaaactatttgatggtcatggacagagaagatcaatatcattaaaatggccatactgaccaggcatgatgactcacgcctataatcccagaactttgggaggctgaggcaggcagattgcctgagctcaggagtttgagaccagtcaggacaacataaagaaacccaatttctacaaaaaaaatactaaaagaaaaattagctgggcacggtggcgtgtaatcccagcactttgggaggctgagtcgggtggatcacgaggtcaggagtttgagaccagcctggccaacatggtgaaaccccctctctactaaaaacacaaaaattagctgggcttggtggcacgtacctgtaatcccagctacttgggaggctgaggcaggagaatcacttgaacccagaaggcagaggttgcagtgagccaagatcacgccattgcactccagcctgggtgacagagcgagactccgtctgaaaaaagaaaaagtaataataataataataataataataatacaggccgggcgtggtggctcacacctgtaatcccagcactttgggaggctgaagcgggtggatcatctgaggtcaggagtttgagaccagcctgaccaacatgatgaaactccagctctactaaaaatacaaaattagccaggtgtggtggcacatgcctgtaatctcagctactagggaggctgaggcaggagaatagcttgaactcggaaggcggaagttgcagtgagccaagatcgtgccattgcactccagcctgggcaacaagagcaaaactccatctcaaaaaaaaaaaaaaaaaaagaaagaaagaaagaaagaaaatataatatgtaaatatcatggaatactgtatgaccataaaaaaggaacaagatcatttcatttgcagtcacatggatgaaattgaagcccattattcttagacaactaatgcagaaaggccagccatggtggcccacacctgtaatccaagtacttttggaggcaaggagggcagcttccttgaggtcaggagctccagaccagcctggccaacatggtgaaacgccgtctctaccaaaaatacaaaaactagccaggcgtggtggcttgcctgtaatcccagctattcaggaggctgaggcaggagaatcacttgaacctgggaggcagaggttgcagtgagctgagatcgcgccactgcactccagcctgagtgacagagcgagagtccatctcaaaaaaaaaaaaaaaaaaaaaaaaaaggtaaactgatgcagaaagagaaaaacaaatgcactatctcatttataagtaagagctaaataataagaacccatggatgcaaagaggggaaaaacagacacaggcctagttgaggttggcaggacaaagacctgtttgggccgggcgcggtggctcattcctgtaataccagcacttttggaggctgagttgggcagatcacctgaggtcaggagttcgagaccagcctggtccacatgatgaaacctcgtctctactaaaaatataaaaattagccgggcatggtggcaggcacctgtaatcccaactacttgggaggctgatgcaggagaatcacttgaacccaggaagcggaggctgcagtgagccgagatcataccattgcactccagcctggacaacaagagtgaaactccatctcaaaaaaaaaaaaaattaaattaaataaataaaaaaaaaaaaatacctgtttggtgctatgcttagtatcttggtgaaaaaataatctacatcaaactttcatgacacaatcttacctatgtaataaacctgcatgtgtacctctgaactaaaattaaaagttgaaaggaaaaaactcgacgggtgggggtaagtgcaatatgtaaactgaaagattggtttgtgctatttatttctgggtccatgcaggcacgtgagattatgaacaagtggcccagaaccctaagttggtggggagaacaggttgctgctgcagattcggtgtctggggaacaggaatatgccgggagactcgtagacacttttgaaggatttttgcaagaaatgctaaatcaaaaatgctgtggtgaagttcctgagggtggtgccttgtcctgagaggggtgtggatgcatcagtgtctagtgggcatgattgtgagtcggtgggaatcctgtggtggcaactgtggaaagagaaggtctgtcatcagagattctttcctctaagttttcagtcctctctcactctaagagaagacctggaatcagaaaacaatgggcagtgtgacagccagtacataggagcagagcctcccattcccagacactcagttttattccaggctagaccttttatggtatttttattctggcacaaaatctatagagtttgctgaacaccaagcaactctccaacaccaattctttatctaacatttaaattctgacaccacccagagtcagcacagatgctgattcagggcttggtctcaaaatattgttcttactacagttgccagtaacaaaccccatgggcccatttatgcttctaaattatgagcccattatgagctactgtttaaaaattcaggactcccataaacttgctcaagttcaataacttaatagtgctatacacagtacttagaaaaacactgtagttatgttgaccggattattataaaagatacaacccaggaaaagtcaaatgaaagaaatgtgtaagacaaagaaaagaggtggggagagatgaagcacgtaggtaatcctggtaaatggctataattaataaaattctccatcttttgtgtgctccagaaacagtttatggaaagaaacacacatcccattatgacttagatgatgcactcttttcttacctatcacatagccagacatagattctgcccattttcttcttattctcttagaaaacccagctgaatttgtcttcagtggtcaaaataaaatactacttaatcaaacaagtttatctccttcccacagctcctgaacttttgagctaccctcagtctaagccaacatacaaccccattatatgctcctcctaagaacattctctgatttagccaggtgcggtggctcacgcctgtaatcccagcactttgggaggccaaggcaggtggatcacgaggtcaggagatcgagaccatcctggctaatatggggaaaccccatctctattaaaaatacaaaaaattagccaggcgtggtggcgggcgccagtagtcccagctactcaggaggctgaggcaagagaatggcgtgaacccaggaggcggggcttgcagtgagcagagatcgcgccactgcactccagacctgggcagcagagcaagactccatctcaaaaaaaaaaaaaattatctgatttagaatctgattttttcacccttcatttgccattcccctcccaccttgtttctcatcttggttgctccttaatatgaaaaaaacccacccttgtctgcctaacctttgagatccttaaagaccttataattggtacttcctcctgttccaatactcctttggaacttaattttttaaatataaatctaactttatatttaaaagtctagaaacgcctcaaagcaagaacaactttatcttcagtaagatcctttcagtcccattccatcttaactgcatctgtctgtgggtcctcagctttccatggctctatagcttctcttcagataaaaggcttcttccatggctggagtgagcaggctaggaaatctgcaggggaggctccccaggaagaactaactgggcctttaataaccttcttttgcaggatcaatatgagcctttagcttggagtcactgggctcaagctttacttttccagtaagagttattcactcaggttttgaaactcagtgtttgaaaaatcaagtaaaattactcaaacacagtgctcatataaaagaaaaaaaatttaaggtgcttaagttttatacctcaataagaaaagcaaaagaatctaaactttctttcagacaataaatactttattatctccattataaatcatgtagtaaacaattagtcatatggggacacctctaggaggtaccaagttttgtcttataaaatttagcatcggccgggcgcagtggatcacacctgtaatctcagcactttgggaggccgaggcgggcagatcacgaggtcaggagttcaagaacagcctggccaacctggtgaaacactgtctctactaaaaatacaaaaattagctgggcgtggtggcatgcacctgtaatcccaggtacgctggaggctgagagaggagaattgcttaaacccggagtcggaggttgcagtgagccaagatcgcaccattgcactccagcctgggcgacagagcaagactctgtctcaggggaaaaaaaaaaaagaattagcattaaactcatacatcaagattacaggatatagaacagagatattcactctcagaaatttaccctgcaataagaggaactgatgtttttatcaatctatgtaactcagcaattatctaccacattttcttgtgaacatgtattcattttctacagccaaaatggaagagaaattttccttattcttttccttgatagctctctaaaagctaatgcttgaaattgtgtttgaaaacactcaggcaaaaaaacacacctgagaaggctgggcacggtgactcacgcctgtaatcccagcactttgggaggccgaggtgggcggatcacctgaggtcaggagttcaagaccagcctggccaacatggcgaaaccccgtgtctactaaaaatacaaaaattagctgggcatggtggtgtgcacctgtaatcccagctactcaggaggctgaggaaggagaatcgcttgaacctggtagtcagaggctgcagtgagctgagaacatgccactgcactccagccttggcaacaaaatgagtgagactccatttcaaaaaataaaaaatgtacctgagaaaatttctaaactcacagtggggaaaaaaaagtaaatgagaatttttaacaatggaatatatgagtaggtattttttgaaacctgtctattttatgtttttgtaaatattttctcacctttcaagctctactaataaaatacaatttacagtttaaaagagtcaatataagtgaacaaatcttttcaaggtgacaaaacaaaggagtggcagtgctgattagaaaacagatgtgtctgactcattcgtcaagtcaggccatccaatccctggagagattttcccaccccatcctgctcacttaagtgtccaatgaccaccttctcaggagacactgcattacgccccaatgagtgccccaagtgcattttacttggcaagttcttgtactagctcactgagatgaggtttttatctgtctttggggatacaattttttttcacaaatcttggagaatccagctggcagaaattatttctgttttcccctcaataccagcgtctgatcgctgaccagcaatatgtctccaagaaatggaaaatggcttggataaaaacaatcttaatgtctcaaagggttagcttttcaaaggaagaatacaccaggagatccctctaagccccagggcattcaccttcttcttgagaggctacactccatacctcagcttgttctataagagaaaatgacccaagagctgatattaactctagcagatagacatggtgggtatcttggtttattcagatagtacaggaccaggaaaaaactaaagggtagctgaggacacatcaccccataaagtttacaaaaaacactgacccccaaagcattatgatctctgtgcttagggaagataaaagaaaaagaggcacagatattttttaaaatacagtgtcaggggattactctttgctttcttctcatggaaaatatttaaaaacagaaaacaaatttttaaaatgttttcaatgtgttgtcagtaaataattaaaatacagtatgaaaaatatacactaaaggacaaatagttcataatgtgaattagggaaagaaagttgacagttccttgaagtaaagtactaaattttcagttctcgagattgtcagaactggaaatttagtatgtatttttacttcaagccagagttaggctggaggtaaggagaactgggggatacacgggagaccctgcttggaacacacgtaaaaaatgcggggaaaatcagtcctctgtggagtgtgaaaatagttaagtgccaggcaattagtctgaggtggaaatctaggccctggattcttgctttgaaaaaaaatctaactcaaatgcattttttttttttttgtaaattactacattagaggaaacaaaattcaggcttaaccgactataaactgtcaattaagctccaattacacaaccaggaaatttgtacgttcaaggtggaaaataagaaactgaggcagggagcactgactcatgcctgtaatcctaccacttagggaggctgaggccggtggatcacctgaggtcaaaaggtcgagaccagcctggccaacatactgaaactctgtctctactaaaaatacaaaaattagccgggcatggtggtgggcgcctgtaattccagctacttgggaggctgaggcaggagaatcacttgaacccgggaggtggaggttgcagatcgtgccactgcactccagcttgggcgtcagtgcaggactccgtctcaaaaaaacaaaacaaacaaacaaacaaaaaaaactaagaagaagaaaagaggagagaaacaaacaaacaaagacaggaagacagaaagaatataactgtacctaaccaattattgaatttgggatttttgcatcatgcaccttatcaaagtccttcaagcccctcttataaaccaaaaactacaacccataggggtgctctaaaatttttgaaccactctttgattaaattatttaatatttttgcagagactgccttttttttttttttttctagacagagtcttcttactctgtcgcccaggctggagtgcagtggcgcgatcttggctcactgcaacctcctcccaggttcaagcgattgtcccgcctcagcctcccgagtggctgggattacaagcatgcgccactatgcccggctttttttttttgagacagagtcaagctctgtcacccaagctggacagcaaatggcgtcagctcgcctcactgcaacctccgcctcccgggttcaagcgatttttctgcgtcagcctcctgagtagctgggattacaggaccgcgccaccacgcccggctaattttttgtatttctagtagaaacgggggtttcaccatgttggtcaggctggtctcgaactcctgacctcgtaatccgcccacctcggcctcccaaagtgctagcattataggcgcaggccactgtgccagactaatttttatatttttagtagagatggggtttcgccatgttggccaggctggtctcgaactcctggcctcgggtgatccgcccgcctcggcctctcgaagtgctgggattacaggcgtgaaccaaagcgcccggcctgccataaatttttaatagggggaaagatgaactggaaacgcagcggactaaagcccttcccattcatgaacccgctccccgagtcaggattctcccctgactaccctcccttggtccctgcacaatctgggagagacgctgcgctgcgggagcagagctgcccagagagggctccaggtcagggcacagtcactgggcggggaagagacaagacgcccgggggccggctgtcagcgaagccgccatcttatggctgaaggggactgaggcccagctgggcaaggagaactcagggcgcagtttgtggagatgactgcggggaggcccgagtccgccacagccacttcccacaggtttcaaccagcccctccctctctctccggatgtcggagccgccactctcaccatttctaggcttccaggggaggccctggcgtcttagctgtggatctcccaatgcttgcaggtcagagggccacagaggctgggcctctaagagcaggggacacaaagcagggaagacgagaccaagcgctccagctgcagcgagagacaaaggccccgccaaatcccggaagccgccctgtccgctccagttgcgtgcctgattggacggtccccagctcagggtccctgattggaaaacgtctaaggcccagccccttcaggccttaagtgacagaagacctgaccaaacgctggactgaatgaagaaagagtgacagcctaagctgcagcgttttcaggcagggcttcctccctgagcttagcccaccccggagggtatttgcatttgacctcgtgtatgaggtttcatgtatttataaataacatactatacggctattcacaaatgaaaaatatataataacaataattttaaaatttcagtttttatgatcttcctggcttctggcatttgagcaagcagcctgagacttttttaaaaaggcaatcctctgaaataaaatataagccacatgtgaattttgaattttctagtagccaactttaaaaagaaacaagaaaaaggtggagttgattgtaacaatttaacttacccaatatatccaaaatattatcagtttaatatgtgagcaataattatatatgtatatacatgtatatgtatgtatatatgtatatatgtgtgtatatatgtatatatgtatgtgtgtatatatgtatatatatgtgtgtgtgtatatatatatacatatatatatatatatatatatatatatatatatatatcactaaatctttgaaactcactctgtattttaccattccagcacatcgcagtttagaccagcgacattccaggcacccaggagccacacgtggccaatagctgccatattgaagtgcagctgcgatgtcagctgagtgaagggcctggacatcagaggtgggggaaagcctcttcctaccaacatctcttcagttcccagggtggaacagatagtggccataaaagagcagaaggcagcaagaataaaataaccacacatagaccactgctggccacctgttgaccaccttccttccagattaaacagtgaacaacaagtgatggggtgacaggagaagtaaactctatgtcttcatatctgtccagtcttttttgagacagactttcactcttattgcccaggctggagtgcagtgaagtgcaatggcaggatcgcggctcaccacaacctccacctcccaggtccaagcaattctcctacctcagcctcccaagtagctgggattacaggcacgtgccaccacacccagctaatcttttgtatttttattagagacagggtttctccatgttggtcaggctggtcttgaactcccgacttccggtgatctgccggctcccacctcccaaagtgctggaattacagacgtgacccaccacgcccggccttttttttttttttttgagacagacttgctctgtcacccaggctggagtgcagtggcacgatcttggctcactgcaacttccacctcttgggttcaagcaattccctgcctcagtctcctgagtagctgacattacaggcgcccaccaccacgccgagctaatttttgtatttttagtagagacagaatttctccatcttggccaggctggtcttgaactaccgacctcatgatccacccgcctcagcctcccaaagtgctgggattacaggcatgagcccagccttgtccacagtcttgacctccaatgtttatatatgaagaaaacagattaaaggcaaacttattttgctatttgaccttggccctaatggtcaggctgtggttatctgttttattttgtggtgtgggggggtctgtgtaagtacaaatcacatgcataaatgtctacgtgtatttctgcattactcagcattatcttacaagacatccaactttctttttatttatttattttgagacagagtctcactctgttacccaggctggagtgcagcagcgcaatgcgaccttggctcactgcaacctccacctcccgggttcaagctattctcctacttctgcctccccagtagctgggattatgggtgcgtgccaccacgcccagctgattttttttgtatttttagtagagacagtgtttcaccatgttaaccaggatggtcttcatctccggacctcgtgatctgcccacctcggcctcccaaagtgagccaccgtgcccggccaagacatccaactttaaatcagaaataaaaaattagaggctgggcacggtggttcaggcctgtaatcccagcactttgggaggcaaggcaggtggatcacgaggtcagaagatcaagaccatcctgactaacacgacgaaaccccgtctctactaaaaatacaaaaaattagctgggcgaggtggtgggcgcctgtagtcccagctactcaggaggctgaagcaggagaatggcgtgaacccaggaggcggagcttgcagtgagccgagatggtgccactgcactccagcctgggcgagactgtgagactccatctcaaaaaaaaaaaaaaaaaaaaagtttgtgacttatgtataatctttaataaggcgactttaaaattattggtaaagtagtatcagcaatgtcttaaatattgttagcattttgttaacttttttgagatgtagtctcactctgccgctcaggctggagtgcagtggcgcgatcttggctcactgcaagctccccctcccgggttcaagcagttctctgcctcagcctcccgagtagctggtattacagacgcctgccaccatgcctggctaatttttgtatttttagtagagacggagtttcaccatcttggccaggctggtcttgaactcccgaccttgggacccacccgcctcggcatcccaaagtgctgggattacaggtgtgagccactgcgtctggaacatttttttaatcaaggggtttttggccaggctcagtggctcatgtctataatcccagcactttgggaggccaaggtgggtggatcacttgaagtcaggagttcgaaaccagactggacaacatgatgaaaccctgtctctactaaaaataccaaaagttggccaggtaccattgtgcatgactgtaatcccagctactcaggaagctgagggaggagaatggctttaacccaggaagcagaggttgcagtgagccgagattgcaccactgtactctaccctcactgacagagtgagattctgtctcaaaaaaaaatcaagtggttttatgattcctccaacaatactataagatttgccctaagggttacaaatgataaagcccagcacatgacagaataacctttgcttgcatatgcttataaaatattgttggcttaatgaaaacagctaaattgtacacttttggtataaacttttttttttttttagaatggtatgaggtcacaggttggtttaagagtgtgccctttcttaaggatgatatgcatggaaaggccaaaagcaatttcaggataccaaaaaaacttcccctaattggcactttaactagtgaggctggggtggaagagcttttcattgacattcccctttatttaacaatttatttagttgaatcaaataaggtactccttttacttttacaaagcccggatggcttctctaccatccaaggaggtaagaagttaaactgagagttttgattgtttttgttttttgagatggaatcttgctctgtcacccaggctggagtgcagttgcttgatctcgccttactgcagcctctgcctcccaggttccagcgattctcttgcttcagcctcctgagtagctgggattacagatgctcacctccacacccagctaatttgtgtatttttagtagggacggggtttcaccattttggctgggctggtcttgaactcctgaccttaggcgatctgcctcccaaagtgctgggattacagggatgagccaccacgcccagccagctgagagttttaatcctctattacacaattggtttctctggcaatcaatcctggtcctgaggctgtccagaagcctccagccagaaatcatctcattaacatacaaaagatgcttctcttttcagacattctaaagattttaggggctgcatacaaagaaactgagacaaactaaatactgacattgataagagcctccagacctggctcagctctggcagtctctggaaagctttgctttactcacctccttttaattagaacctacccccaataaccctgtggacattctttatagcagcggcatgttctggcatttcacatctttgatataatcttggtgtttgttgtttacttccttatacttttgttccggggagctatgtcttgtttacactatattcccagtgccaatcacaggcctcagcccatggcaggtgctcaatgaatagttgtttaatcaatgcacaatggcattgtctgtaaaagggaagcaaggagtaggttagagcacagtttagctcagccacttcctatctggctgactttgggcaagttcctgaattttttcttctttcagtcaccttgtctgtgacacgaggaatcattaaacttacctacagagtttctgctgatgaagatttaatgagcaaaaatatctaaatggctttgaaacactggctggcacagcaagagtgctccacacatcaactgtgtcgactaagggtcaaactctttaaaatatttgaagaaatttattgagtcaaatatgagtgaccatgccccatgacacagccctcagaaggtcctgaggacatgtggcaaaggtgttcttcaaagtgttcattattaaggcatccatctcccataacttcaatgcactttgctaaacaatgcattatttctgaggacatctgaatctgtttctgtaccaatggtcttaatcagaacatcacataaattgccacatctgtgtgagatactcaggaccacggactctcacacactccagaagaaaaggcacggattctgctgctgcccctccaacaccattgtggaaataaaatttcagtaaagggaccaccagtttgacaacctgcttggtgtactccacaaagcagtcaaatcagctatgtgctgcaaaaggtcactttttttttctttgagatggagtctccctgtcacccaggctggagtgcagtggcgcaatctcggctcactgcaatctccgcctacctggttcaagcgattctcctgcctcagcctcgtgggtggctggaactacaggcgcctgccaccacgcccagctaatttttgtgttttaagtaagatgggggtttcaccatgttggccaggctggtctcgaactcctgacctcaggtatccactcgcctcggcctcccaaagtgctatgattacaggtgtgagccaccgagcctggccaaggtcacaattcttcctgtgagcagagaccaggtaacagaagaaaatcacatcacctgtgtgagtggtgcaaagacaatgtcctctggtgccaggacccaggcataaaagttacatcacctggatgttggacccagcaatatgtcacaatggcccaagtaggcagagacagaagagtcagataatgtcagtgcagggcccagcaatgtcacaaagtctcctgcaggcaaaacctaaaagaagagaaaagtgctgggcatagcaatatgctacaatgttcctgtaagcagggaccaggcagaagaagacagtcacatcgcctagatgctgggcctagtgatatgtcaaccatcttttctgtaataaagacccaagcaggagaaacacatcacctggttgctggccacagaaatgtgccacaattttccctgtaagcagggtgctggcaaaagaggagagtcacatctcctaggtaataactgtgacatacctgtgcagaagtatgtcacaatgcccccttcaggaaggggccaggtagagaactcccgtcccttaggtgttgagcccagtgtcacatttgggtatgtcacaatacccaaatatgtggggcctgagaaaaagaggagagtcacatcaccaagatgctaggccaatggtatgtcacaatttccctgtgagcagagaccaggcaggagaagagtaacattaccatggttatgggcattcagttatgtcacaaagccccctgtagtcaaggcccaggaaaatgttacatcacttgggtgttgagcccagcaatatgtaatgatgtctaatgtgacacattgtgctgcaatatggcacaacatgcaggacataggttggagagtcacataacatgggtacaggatccagcaatatttgacaatacccaaaatttgtggtgtccaaaaagaagagtcacatcactgagatgctgggtccagtgacacatcacaatcttcactttgggttgaaccaaggcaggaacatcaaaccactcaggtgtgtaacaaagacatatgtcacaatcacacctgcaggaaggtccagtaattaaaaatcctgcacatgtcccagttctaggtatcagagtatgttgggtctaagtatgctagtgacaatctcaccaactggatctgtgcatgagagctgagagccttcatcccttccatgaactgtttggccctaagcccaggtaggagagtcaacatgtcccccagccaattagggacatgttgactatcctacctaggcttagacaggtagaattctcacctatgaactggatttagaaataagtcattatttcaactctagccagatgttcacatatgacagtcacaattttaactgtagactgtgtgtgtgtgtgagattcagggcctcaccagtgggctctgtccatgtgtgagggtgacaattctaacagttggtggggagtgtatatgagaaacaatctcatctgtatgctgaaccctgtaatgacactctctgtaccacaagagatttatacagtatgcaagaaagtggcaattcttcatgacctttgtacaaggagacccagaatcatattcatgactctaggcctagctgttaagagacagcatcttgggctgggcacagtggttcatgcctgtaaccccagcactttggaaggccgaggtgggcagatcacctgaggttgggagttcgagaccagcctaaccaacatagagaaaccccatctctactaaaaatacaaaattagctgggcgtggtggcacatgcctgtaatctcagctacgtgggaggctgaggcaggagaatcgcttgaacctgggaggcagaggttgtggtgggcagagatcacgccattgcactgcagcctgggtaacaagaacaaaactgtctcaaaaaaaaaaaaaaagaaaaaagagagcgagagcaagagagagcatctctcctattaaatactgtgaggtatgagagtaatcattgcatctgtgatctaggtcaagatatattttacaggccaggcgcagtcactcacacctgtaatcccagcactttgggaggctgaggcaggtgcatcacctgaggtcaagagtttgagatcagcctcaccaacattgggaaaccctatctctaatagaaatacaaaaattagccaggtgtggtggctagctactaaggaggctgaggcaagagaattgcttgaacccaggaagcggaggttgcagtgagccaagatcatgccactgcactccagcctgggtgacaaaatgaaactgtctcaaaaaaaaaaagatatattttacaatcctgcctatgaatagggagagaggagagtcacatcatctgggtttttagccaggaatatgacacaacctttttttttttttttttttttttgagatggagttttgctcttgttgcccaggctggagtgcaatggcacagtcttggctcactgcaacctccgcctcctaagttcaagtgactgctgtgcctcagcctctcaagtagctgggactacaggtgcataccaccacgcctggctaatttttgtaatttttttcccaagatggaatcttgctctgctgcccaggctggagtgcagtggcatgatcttggctcactgcaacctccacctcccgggttcaagcaattctcctgcctcaggctcccgaatagctgagtttacaggtgcccgccaccacacccgattaatttttgtatttttagtagagacggggtttcaccatgttggccatctggtctcaaactcctcaggcgatccacccacctcggtctccctaagtgctggggattactggcatgagccaccgggcccggcttgacacaaccttttctgagggcagagatcagtcaggagtgtgactgcatactcagccaggaataagttacaaccttctcctgaaagcagcacacaggcagcagagtcacatcacctgggtgctgagcccagcaatcagtaacaatgctctctgtggtccaggcccaggcagcagagacacatcacctggtacctgggccagccacaattttttctgtggggcacgtacaggcaaaaatggagcatcacatctcctaggttattgatgcagaggtatgtcacaaggccctctgtagaaagagcccaggtggtagtctcccattttataggtgttggacctagtaatatgtcttaacatgaaaaatattcagggcctaagcaaaaaaggagagtcacataacctgagtgcagggcttaggaatatgtcacaatgcaacatgtgggcagctccaaggctggaaaaaagagtcacatcttggaggttcagagtcaagccatatgtcacaatctcatttgtgtgcttggccaaggcaggagagtcaaatcactaaggtgctttgcaatgcacacaatcacacctgcaggaaagtccagggattagattagaaattccaaacatgtccaggttctaaaggtatgaaagtcaacacctcctgtatgttgggtctaagtacatgagtcgcaatcacaatgattgacagaatgtgtgcaaaagagccacagtttcttctgcagactgtatcttcttagtgtagtcacagccttacatgtgcgctgaaccttggtctggaagtcactaacccacctgtggaccagatccacacatgagaggcaattatccaacttttgacagcctctgtgaaattcagaacttcaacagtgggatgtgtttatgtgggagaatgacaatctttactgttgcctgggtgtgcattcgagagacactctgtgtcacctgaggactttatacaatatgcaagattgataatcctctatgacctttgcacaaggagctccagaatctttcctgtggttctaagcccagatatgagagtcaacatctctctcaccaactgagtccagataggagagtcttcaccttcctatgagctggatttagaaatgagtcaccatcccaactgtagccagatgttcacatatgacagtcacaattccaactgcggactgtgttcacatgtaattcagaacctcactagcagactctgtcaatgggtcagggtgacaactgtaaaggttggtgtagtgtgcataggacaaacacaatctcacttgtgtgctgggccctgttatgacattctctgtaacacactagggcgtaatatatgtgagagagtagtaattctttatgacttttgtacagaaagacttcctcattttcctaagcctgagagcaacattctctctgctattggcttcttcaaggtatgacagtcatcattacatctgtacgcttggccagatatatgtcacaatcctacctgtatgtaaagagcaaattcaagagttacatgaactgtgtgttgggccagggctatgtcacaatcctccctgagggcaggcatcaaacaggagaatcacatcactgggggcttgaccagggatgttacaatccctcctgaaagcagggcacaggtagaagagtgagatcccttgggtgctgggcccagatatgacagacaaaacgactggttgctgggcccaacaatatgtcaaaatcttccctgtgggcagaatgcaggcaaaaatacagagttttatctcctgcatgatggatgcagaaatacatcacaaagctgggtgcagtggctcacaactgtaatcccagcattttgggaggccaaggcaggtggatcacctgatttcaggagtttgagaccagcctgaccaacatggagaaaccccgtctctattaaaaatagaaaattagccgggcatggtggcagatgcctgtaatcccagctactcgggaggttgaggcaggagaactgcttgaacccgggaggcggaggttgcggtgagccaaggttgcgccaccgcatgccagtctgggcaacaataacaaaactccatctcaaagaaaacaaaaaacaaacaaaaaaacatcacaaggcctcctgtgggagggactcaggcaggagccttccaacccctaggtgtttgttccagttgtatatcacaatgtctaaaatatgcaggtctcaggcaaatgaggagagtcatatcacctaggtgctgggtccagtgatctgtcacaatcttttcttttggcaggcctgaagcagaagagtcacgttacctagataatgaataaagagatgtgttatttccgtgggagcatccatgcaggacagtcacatcaccttggtgttggacccagagacatgttgcaacacacaatgtatgcaggtcccaagcagaagaggagagtcatatcacctaggttcttggtccagaaatatttcatgatatttctggaggggagggcctaggcaaagaagtcacattacctaagtgagaggcctaaagatatgtcacaatgcctcctgcgggtagggctcataaacaagaggagagtcacataacgtaggtgctgggctcagctttatgttacaatcatcccagtaggaagggcccaagcatgaaagaaaagtcacatcacataagagctacgtcaagcgatgtatcacaattcccactgtggaccccagaagaggagtcacatcatctaggtgatgggcccaaacatatatcacagtgacttgtgtgtgcaaggaccaagcagaataattacatcactggtgtgcttggtccagtgataagtcactctctattctgtgggcacggcccaggcagtagaggagtgtcaaatcacgtaggtaaaagagggcatttatctgtgcttttcccacaggagagattgcagtgggtcaacagataggtcacaatgcttcctgtgatcagggttcaggcagggaactcacatcatcttggtgctgggcacagcagtatgtctcaatgccttccaagggcacagccaaagcaaataactaacatcaccttagtgttaggcccagcaatatgtcacaatctcctttgttgtcagaacctagaataaagaaaagtcacatcagctaggtgctgggcccaatatgtcccaataccccctgtgagtacagaacagggaggaataaaaagtcacatttcctgggtgattggtgaagacatatattacaatgccctctgtagacaggtccagggtgaagcgttacatcacctgggtgttgcactcagcaatgttacaatggcctatgtgtttagggcacaagcaagagtcacataacatacgcccagcaatatgtcacaatacacctgtgggcagcaccaaggcagaagaggagactcaaatcacctaggtgcaatgcccagcgatgtcacaatgacccctgtgggctgtatcaaggcagaatagaatcacattaccaagggtctggatccagtgatatggcactgtgagctggacccaggaaacaacaaataactcagatgctaggccaaggtatatgtcacaattacacttgtcaaaaggccttgcgatgacattaacaattacacacatgtcctgagtcaagggatgagagtcaacacctcctgcatgttgggtgtaagtacagggtggactggatttgtgcgagagcctcaatttcctttgcaaattgtgtgccttagactgggcacggtggctcacacctgtaatctcagcattttgggaggccgaggtgggcggatcacttgaggtcaggagttcaagaccagcctgaccaacatggtaaagccccatctctactaaaaatacaaaaaattagccaacatggtagtgagcacctgtaatcccagctacttgggagaatcaggcaggagaatcgcttgaacccagtaggcagaggttgcagtgagcggagatcacgccaccgcactccagcctgggttacaagaatgaaacttcatctctaaataaataaagctccttagtgaagttacagtcacaaaggtgtgctgaattttgattaaagagtcacccaaatgtggacaaaatccacacaaatgagagtcaattttccaacattcaactgcctccaaaagtgagattcagaacctcaaaagtagggtgtgtttaagtaaatgacaatctttgctattgactgggtgtgaatgtaagtttgacaatctcacctgtgtgcttggccctgtaagggcactctcttgaggactgtatgagttgcaacctactctgagaactttgcgctgctttggacccatgatcttatgtggtcctaagtctaggtatgggtcaacatctcttcaattggctgggtccagagaggagagtcctcactcacctatgagctgggtttagaaatgagtcaccatctcaactgtggccacgtttacatatgatagttacaattttaactgtggactgcatctgtgcatgagaattatgacctcatcagtggactttcaccatgtgtgacgatgacaattctaaaaattgtcagggagcgcttacatgaaacatgatctaacctgtttgctgggtcctatgatgacatgctctgtatcatctgagtgctttatacaatatatgagagtggtgattcgctataaccttcatgcagagaggagacctgagattttactcctttttctaagcctagctgtgagagacactatctcttctattgactggtatgaagtattagagtcatcatcaaacctgtgagctgggatgagatatatgttaccaatcaacttgttggcagaaagcacccaggagagtcgcatcacctggatgctgggccactgatatgtaaattttttccctgagggctgtgaaaagccaggagagtcacatcatctgggttttcaaccagtgacatgttacaactttctcctgaaagttatgtacattcaggtgagacacaacagctggcggccaggccctgcagtgtcacaatctttcctgtgggcagggtacaggcagaaaaggtatcacatgttttatgtaatggatgcagatatatgtccagatatatgtggacagggctgaggcaggagcctcccattttttaggtgtttggcccagtgaaatgtcacaatacccaaaataagtggttgctagacagaagagtctcatcacctaagttctggtttaagtgatatgtcacaatctttctttttgacagggttcagggaggaaaggagtcatatcactgagatgaacaaaaataaatgtcctaataaccccatgctcaaggtccatgtgagagagttgaatcacccatgtgttgaacccagtgacatgtcaaaatatacaatttatgcagggcccaggcaggagaagacagtaccttcacctaggtgtcaggcccagtgatacatcacaataccttctgtgacagagtccaagcagtggagaagagtcacattacctaggtgctgagtcaaaaaatatgtcacaaaaatcactgaagggagggcccaggcaggagtcaaactacgtaaattaggggctcagagatatgttgcaatgacctctgtgggttggactcaggagaaacaggagagacacataacctaggagctgagtacagctatatgacataatcacccaatttgataagcccaggcaaaagaagagagtcatatcacataagtgctgggccaagtgatgtgtcacaatcctcattatggacagttcccagaaagaaaaggagagttacatcatctaggtgatgggtctagatatgtcacaataagccatgtgggctgggatcatgcagaagaatcgaatcacttgtgtgttaagcctagtgataagtcactcttttctgtgggcatggaccaggcagggtaggacagtcataatatctaggtgctgggcccagagataggtcacaatctctactattagcaaagcccacgtaagaaaagagtcgccgggcacagtggctgatgcctgtaatcccagcactttgggaggccgaggcaggcagatcacctgaggtcagaagtttgagaccagcctgaccaacatggaggaatccttctctactaaaaatacaaaaaattagctgggcatggtggcaggcacctgtaatcccagctacttgggaggctgaagcaagagaattgattgaacccgggaggcggaggttgtggtgagccaagatcatgccactgcactgcagcccaggcgacagtgcaagactctgtctcaattaaaaaaaaacaaacaaaacaaaaaaccccaaaaaaacacaaaggaaaaaaaaacaacaaagctctactgtgtactaaatatttcacaaaatattttttctttttttttttttttgtttttttttgagatggagttttactcgttgcccaggctggagtgcaatagtgtgatctcggctcactacaacctctgcctctcaggttcaagcgattctcctgactcagcctcccgagtagctgggactagaggcacccaccaccatgcccagctaatttttatatttttagtagagacagggtttcacaatgttggccaggctggtcttgaactcctgaccttgtgatccacccacctcagcctcccaaagtgctgggattacaggcatgagccactgcatctggcccagaaaattttcataaacaggggcaaatattattacttctcataaattattgttgtattgtgcattaatatataaaaaattgctaggataaaatttagtagtcaatatagcccaagaaagattgttgccaggcatggtggctcatgcctgtaatctcagcaatttgggactccaaatgatcccaaaggatcacttaaagtgaggagttccagaccagcctggccaacatggtgaaacgtctctatttaaaaaaaaaaaaaaaaaaaaaaaaaaaaaaaaaaaaaatcagccaggcgcagtggctcacgcctataataccagcactttgggaggccgaggcgggtggatcacaaggtcaggagatcgagaccatcctggctaacaaggtgaaaccccgtctctactaaaaatacaaaaaattagccgggcgtggtggcgcctgtagtcccagctactcaggaggctgaggcaggagaatggcatgaacctgggaggcagagcttgcagtgagccgagatggtgccaccgcactgcagcctgggcgacagagcgagactccgtctcaaaaaaacaaaaacagaaacaaaaacaaacagaaaaaacattagccaggctttgtggcgcgtacctgtaatcccagctactcaaaatgctgaggcagaagaatcactaaaacctgggagacagcagttgcagtgagccaagatcgcgccactgcaccccatcttgggtgacagaagatgactgtctcaaaaaaaaaaaaaaaaaattgttgccattcttgctataatgctataaacctgtaaattctataaaactctcaatttcatattctccatgaattcttacaggcacacacctgtaatcccagctacttgaaaagctgagacagaagtattgcttgaaccctgaagacagaggtttgcagtgagccgaaattgtgccactgcactccagcgtggggaataggcaagactctttcccaaaaaaaaaaaaaaaaaaaaaaaaacacagaaacataagcccaaccccggatctcttgaatgagaatctgcatctcaagatgatctccagtttattgttgcacatgatacaatttgcaaagtgtgcttctaaatcactgacttttctacctgataattatacacagctgattctggatgatttaaaatagcactcaggccaggtgcggtggctcacacctgtaatcccagcactttgggaggccgtggtgggcagatcacaaggtcaagagatcaagaccatcccggccaacatggtgaaaccctgtctctactaaaaatacaaaaattagctgggtgtggtggcctgcgcctgtagtcccagctacctgggaggctgaggcaggagaatggcttgaacccgggaggctatgttgcagtgagccgagatcacgccactgcactccagcctggtgacagagcgagactctgtctcaaaaaaaaaacgtaaaaataaatttaaaaatataaaaaattagccaggtgtgctgttgcacatgtaatcccagatactcgggaggctgaggtaagagaattgcctgaacctgggaggtggaggctgcagtgagctgagactgtgccactgcactccagcctaggcaacagggcaaagacctcgtctcaaacaaaccaacaaaccaacaaacaaaccaggctgacttctgcgtaaaatattccctgatctagcatctactttcaccatgttctatccctccccttcccactttttttctgactttgttttctcttccttatgaaagaaagtccttttctctctaacctttaaaattctccaacatcttataattggtgctttccccttgttgcaatactcctttaaaattaagtaacttcattagctgggcatgatggcgggtgcctgtaatcccagctacttgggagactgaggcaggagaattgcttgaacccgggaggcggaggttgcaatgagccaagatcaccccattggactcgagcctagggaactgagcgaaatgccatctcaaaaaaaaaaaaacaaaaaattaagtaacttcttaccaagcacagtggctcacacctgtaatttcagcactttgggaggctgaggtgggtggatcacctgaggtccagagtttgagaacagcctgaccaacatggtgaaaccccatctctactaaaaatacaaaaattagccaggcatcagggcgcctgtttgtagtcctagctactagggaggctgtggcaagaagatcgcttgaatctaggagacagaggttgcagtgagccgagattgcaccactgtactacatcctgggtgagagaatgagactcaaaaaattaagtaacttcttacctaaatctaaatttgtcatattttacaaaatctagaaacaacctcagaataataacaactctattcccagaaagagcttcccaaccccacttttgtgccaatcccaactgcatctgcctgtggatttcgaggttttcagggctccgtggcttctctaagtataaatgctctgtccatggctattgtgagcaggccagaacatctgcaggggaggctcctcaggcagaactggctgctccttcaatgatctcactttacaggcaaagctgtccttagcttgcagtcactgagttcaggcttctacttaccagtcagggttactcacttagttttaaataagaaaatgaccaatgtaaggccaggtgcggtggttcaatgcctgtaatcccagcactttgggaggctgaggcaggaggatcacttaaggtcaggagttcgagaccatcctgaccaatttggtgaaccccatctctactagaaatacaaaaattagccgggcgtagtggcatgcacctgtaatcccagctatccataaggctgaggcatgagaatcccttgaacccgggaggcgcaggttgcaataagccaagatcgcaccactgcactccagcctgggcgatagagcaagactcagtctcaaaaaaaaaacaacaaaaaaagtcaaaaaacgaaaatgaccaacgtttcaagaaaagagtaaaatcactccaacacattgtttatagaatattgtaaggaaattgtaagacttaaattttctactacaatataaaaagcttaagtaggtttgggcacagtggctcacacctgtaatcccagcaatttgggaggctgaggtgggtggatcacctaaggtcaggagttcaagaccagcctggccaacatggtgaaacccgtctctactaaaaatacaaaaattagctgggcgtggtggtgcttgcctatagtcccagctacttgggaggctgaggcaggaggatcgcttgaacccgggaggtggaggttgtagtgagccgagatcatgccactgcactcaagcctgggtaacacagtgaggctccatctcaaaaaaaaaaaaaaaaagaaaagcataagtatctgtccttttcagacaataacatgttatttaaatatttccctgatagacaatttaataaacaactatatgtgaacatttctagaaggtgtcaagttccatctcataaaatttagcattaaacttggacattcagacaacagaatacagaacagagatacccatcgttacaaattctagaccctgcaaaaaagaggagttgatggtttgagaaatatatacaatgcaccaattaatctatcacatttgcttgtagaaatgtattcactttctatagctttaatggaaaaaagatttttccatttctcttctctgacagcattccccaaagcaaagccctggggttctatttaaaatcttgcaaccggccgggcacagtggctcatgcctgtaatcccaacactttgggaggctgaggcgggtggatcacgaggtcaggagatcaagaccatcctggccaacatggtgagaccccgtctctactaaaaatacaaaaaattagccgggcatggtggcgggcgcctgtagtcccagctgctcgggaggctgaggcaggagaatggcatgaacccgggaggcagagcttgcagtgaaccgagattgcaccactacactccagcctgggtgacagagcgagactccatctcaaaaaaaaaaaaaaaaaaaaaatcatgcaaccagaaaaaacagacatgagaaacttactacattcactctggggaagataaaggtaaataagaatctgtaacaaataacatatatgactagatttttctgaaatatacctttcaaagtctttgactttttaaacatcatttaagctcttttgatgaaatgtaacttacagttattaaaaaactgaaatcaaaataagtgaaaaaatctttccaaggtgacaaactcaggaagtggcagtgctgattggaacacaaacatgtctgactccactgtcaagtcagaccataatatcactcaaaacattctcccatccccaccctgcccattaaattagtgaccaccttcccaggagacactgtactgtaccccactgtaagcctcaggtgcattttgcttcaggttcttgcattgccttactgggatgggagcttcttgtcctttggaaaaaattttatttcaagaatcaacagaaatcatttctgctttttctcatcaataacaacatctgattggctcaccaccaacgtgtctactaagaataaaaattaggttgataggttgagaggccgggcgtggtggctcacacctgtaatccctgcactttgggaagtgggtggatcgcctgaggtcaggagttcgagaccagcctggccaacatgatgaaaccccatctctactaaaaatacaaaaaattagccgggtgtggtggcaggtgcttgtaatcccagctactcaggaggctgaggtaggagaatcacttgaacctgggaggcggaggttgtagtaagccgagattgggataatgcactccagcctgggcaacaagagtgaaactccatctaaaaaaaaaaaaaaaaaaaataggttgagaagaaactttttaactgtttacacacttgttcatttttatgtcatcagggaagacccctcaatatatttcagagtcaacgggtaacattttatttttaataattttttttgagacagagtctcgctctgtcacccaggctggagtgcagtggcatgatctcagctcactgcaacctccgcctcccaggttcaagcgattctcctgcctcagcctcccgggtagctggaactacaggtgcccgccaccacgcccagcgaatttttgtatttttagtagacacagggtttcaccatattggctaggctgctcttaaactcctgactttgtgatccgtccacctccaacctcccaaagtgctgggattacaggcatgagccaccacgcccaggcttttttttgttttgttttattttttgagatggagtcttgttctattgcccaggcaggagtgcagtggtgatcttggctcactgcaacctctgcctcccgggttcaagcaattctcctgcctcagcctcctgagtatctgggattacaggcacatgccacaacgcccagctaattttttgtatttttagtagagacagggtttcaccatgttggccaggctggaaataattttttactctgggactgggtgcagtggctcatgcctgtaatcccagctacttgggaagctgaggtgggagcatcacttgaatctgggaggctgaggttgcagtgagccgagatcgcaccactgcactccagcctgggcaacagagcgggattctgtctcaaaaaaaaaaaaaaaggtatactctgcaccagcagcattaacacaaaaagttctattaaaccctgacacccactcaaatgtcacctcctttataaagctctgattttccctctatgtcagtggcacaattgatcactattaccattcagctcaataccttatgtctttttatgtgcaagtattattctccagaataaattaatcatttacacatctatccatgctaatgaactataaactcctacagggcaggtatgttgaaccctgttcatctgtgtaatcaaaatgtcttatacataataggtatcatatacaagcaaaatccctgtcagggaattattggaaaagctaccaaattcttttaagttcaagggtacatgtgcaaattttttacatagataaatgtgtgtcatggcgattttttgtgcagattatttcaccacccaagtattaagcctactacccattagttatttttcctgatcctctcccacgtccgataggccccagtatgtgttgttcccctctatgggtccatgtgttcccatcacttaactcccacttgtaagtgagaacatgcggtagttttctattcctgtgttagtttcctaagaataatggcttacagctctgtccacgttcctgcaaaagatatgatctcattttttgtatgggtgcacagtggcatggtgtatatgtacaacattttctttatccagtctatcactgataggcatttaggttgattccatgtctttgctattgtgaattgtgctgcagtgcacatacgcatgcatgagtctttataatagaatgattcacattgctttgggtaaatacccaataatggattgctgggtcaaatggtatttctgtctttaggtctttgaggagttgtcacactgtcttccataatggttgaactaatttacactcccaccaacagttcataagggttcctttgtgaaaaaataattttaattttctaagaggttagctttttagacaaatagtatacaagaaaattttccacaggcctaggccatccagctgctcttctgagaggctacactcttactcctcaggctgttctccaagagatgacccaggggatgatattcattagacactccaagagatatggccactgtgggtatcttggattatcccagaccattctgaaactcatgaccaaaaaaagactggagggctgctgtaaagggctctgtaatttctccaaagcaaagcttcaacccaaagatttactaaggtgtgtgtgcctagaaaagataaaaggaagagaggcacagatttttttttttcccagtggaatttcagaggattattttctacttttttctcacgtaaaatgtttacagacttgggaggctgaggcgggtggatcacctgaggtcaggagttcgagacctgcctggcaaacaagacaaaagcctgtctctactaaaaatacaaaaattagccagtcatggtggcagaagcctgtaatcccacctacttgggaggctgaggcaggagaatcccttgaacctgggaggtggaggttgtagtgagctgagatcacgccattgcactccagcctgggcaacgagagtgaaactgcctcaaaaaaaaaaaaaaatgtttacagacagaaaacaaatctttaaaaacctgccattcactgctgtgtaaaaacatgattaacaattaaaacactgtgtttgaaatgtacaataaaggacaaatagttgatagtgttgtaaattggagagaggaagctgtcctcatttcctacatttgagaatgtaggaatgaaagcggacatttataattttactgcaagcctgagttaagctaggagaaaaggtggatttgaagtcctgcttgccatacattaggaagtcacagaggtaaaccagtcctgtggagtgttgagataactaaaaagcaggaaattagactgaagtggctctagtgccctgtgttcataagtaaaaaatgaaaaacctaactcaaattcacttcttataaattactattttaggcagaaacaaaattcaggcttaaccaatcataaacctgcaattaacctctgattacataaccaggaaatttccacctgaatcatacaaataaggtgactacataactgtaaccaattctccaatttggtttgccttctcacacgccctttataaaaccctttcctttatgtctctcaggtgggccacatattatggctgggtgttttccatttcaccaatcactgctcaaataaactcgttaacgttttaacattgactccctttaatatttaatagaagcggctgggcgcggtggctcatgcttgtaatcttagcactttgggaggccatggcgggcgtatcacttgaggccaggagttccagaccaccttccaccatggtgaaaccacttctctactagaaatacaaaaatttgccaggcgtagtggcgcaggtctgtaatcccagcttctcgggggccgggggggggggcgctgaggcacgggaatcgcttgagcctgagaggcagaggttgcagtgatcacgccactgcactccagcctgggcaacaaagcaagactccgtctcaaacaaacaaacatgtttaacaagagactgggagtctcacctgccacagctccttctacgcacacacgagtcggaattctgccctaatgacccgcctggcatccctgaacaatccgggaaatactcggcgctgcgtgcagagctgcccagggagctccagacacggcgccgcagggtccgggcgggacgccggggtcccggctgcgggcccagccgccatcttacggcgagaggggtctggggcggagctccgccagcggagactcaggttggcgacccgggagcggactgtggggaggccggtcccgccggtttcacagctcgctctcccctctcgggatgcccagccccgcacactcaccttttcccagcttccaggatgtcctggcatcttagctgtgcgtctcccagaacctgcagatcacagggcaagaggctgtgacagtcaccgggggctcccgaggtggaggacgtaaaacagcagagaccgatcccaagctgtggcgggagtgagatacaaaggccccaccaaatgccggaagccacgccctcctctccaactgggcggttcctgcgctagcgccactgattggataaagcaccagcactctctctccataccaaccccctcctctcagcattagtgcattttactgacaggaaaacaggctaaagtaggtagggtaaggtgcacagggaattacagctaataaagaagtgagctgagacttgaaatgcacttgctctttcccttacctgggtttgcttgtataatgcatcttatttactacttaagggtaagaaaaaaacatttggacttttttttttttttgtacctagtttcgctcttattgcccaggctggagtgcaatggtgcaatcttggctcactgcaacctccgcctcccgggttcaagcgattctcctgcctcagccttccgagtaactgggattacaggcgcatgccaccacgcccggctactttttgcatttttagtagagacagggttttgccgtgttggccaggctgatctcgaactcctgacctcaggtgatttgcccccctcagcctcccaaagtgctgagattacaggcgtgagccaccgttcccggcccatttggactttttttttgagacggagtatcgctctgtctcccaggctggagtgcagtggcacgatctcggctcactgcaagctccgcctcccgggttcaggccattcccctgcctcagccttccaagtacctgggactacaggcgcccgccaccacgcttggctaattttttttttttttttttttttttttttttttttttttttttttttttttttgtatttttagtagagacagggtttcactgtgttagccaggatgatctcgatctcttgacctcgtgatccgcccgcctcggcctctcaaagtgctgggattacaggcgtgagccaccgcgcccagccccatttggacattttaaaacaactttttaatcattttgataatgcagaaaaaacccagcactttgggaggctgaggcgggcggatcacgaggtcaggagatccagaccattctggccaacatggtgaaaccccatctctattaaaaacacaaaaattagctgggtgtggtggtgtgcgcctgtaatcccagctactggggaggctgaggcaggagaatcacttgaaccagggagtcagaggttgcagtgagctgagatcgtgccattgcactccagcctggctatagggcgagactgcgtctcaaaaaaaagaaaagaaaagaaaagaaaacaaaacaaaaatcctgagatggtgctgctggatatgagtgctggaaagggggagggaattaagagctgaccagatccctcctgactgccccgcagaacaagtggggggtggtgctgcactaaatgatgccctcccacagaagatgtatttgcattggttcaatgaatatacaatgcagagacctaaatgaagacacgtgaatgggtgtatgtggacatcagattgcagctgggaaacaggtgcctctcattctccccagcaagtgtggaaggtgtccatgcccatgagggtatagatctgtcattcttaacttgtatacaactctaggtcagttctgactcaatgacgtgcagatgagatttctcagatcatttgtatgtttgacattgtggctgctgcttttgctgccaccatccccaggcccaacctggcttaaagtccaggctttaggtcaaaacaatggagggcttcctgtgttctgggatgggaagttggagatctgtggtagggctgggggttggggtacactttagttttgtgcagaatgagagctgcagtggttttattaatcgtgatgattggcctggcctggttgtaactctgggcggggggaaggaatcagcattggttgttccccagatattcatgtgtccagccctggccttcctgccctcagacccagcaaaaagtaccaccacagactctgacttgcctgcctactccctgcaccccagatgggaataccttggaggccagactctgaatgtattattctccccattctaaccagacctgcctaacacacagtgagggagtgaagataggcagggtgagggacctggggagaaccagagtggaatcacaaatccttgggaaaagttaaagatacagcagtgggctgggctcagtggctcacgcctgtaatcccggcactttgggaggccgaggcaggcagatcacctgaggtcaggagttcaagaccagcctgggcaacatggtgaaacccggtctctactaaaaatacaaaaattagccgggcatggtggcgcacacctatcgtcccagctactcaagtggctgaggcaggagaattgcttgaacccggaaggcagaggttgcagtgagccgagatcatgccactgggtgacagagcgaaactctgtctcaaaaagaaaaaaaaaattgttctatctctcaaaattgagaagatgaccaatagggagaaattgttaaattaattataccctaaagctgctccctttcctgtttaattttagtcaatagttgttttttgttttacatagtaaactgaaaactaactggacatgtaaatagactgtacccattcttgtaccaaccactgtggtttggccaataaaaggatgtcaactgttcaaaccatgttcaaataaggcaaaccccaagctgtaatcaatctggctgtttctgtacctcactgccattttctgtatgtcattttgctttttctatccataagtctttttccaccttgtggctgtgcttgaagggggcctgcccctccacacctgtgggtatttctcgaaaggtggaaatgagagactgagaaaaaaaaataagacacagagacaaagtatagaggaagaaaagtgggcccgggggaccagcgctcagcatatggaggacctgcaccggcaccagtctctgagttccctcagtatttattgatcactgtctctaccatctcggtgaaggggatgtggcaggactatagggtaatggtggggagagggtcagcaggaaaacatgtgagcaaaggactctgtgtcataaataagtttaaggaaaggtgctgtgccttgatgtgcacataggccagatttatgtttgactttacacaaacatctcagtgcagtaaagagcaatattgccactagcatgtctcacctccagccttatggcgtttttctcctattgttgtaaccgagcgagttatagagaaatgccacactctgagactaattcaggagtcctttattgccagcaactgagagacggctagcgctcaaaattctctcaaccccgaagaaggggctagatttctttttataccttggtctaaaaggggagggggagtctagctgaagcaatttttacagaagcaaaacaggcaaaaagttaaaaaattgatggttacagagatagttacagaaaaataaacagttccaggtgcaggggcttaaactatcacaaagagataatgcaggggctttgggtaccatccaccgagcgcatccccaggagctgctggttcagcttgcctctatatcttatcagtaagtgcattcctggacgtgcttggagtcagcttgcactagttatgtccttaagggagggggataaggggggctgcaagtgaagaaacaaaaatggagtctgtctggctctctcagctaaaagagagtcaatccggttaaaacaaggtagggtatcacactatcttagtaaatagaatgtacgattgggttttacaccgagacattcgaatcctagggacgagcaggagacagatgccttcctcttatctcaactgcaaagaggccttcctctctcactaatcctcctaagcacagaccgtttacaggtgttgggctaggggacggtcaggtctttcccttcccatgaggccatatctcaggctgtctcagttgggggaaaccttggacaatgcacaggctttcttaggaagaggtccctgtggccttctgcagtgcattgtgtccctgggtactcgagactggagaatggtgatgacttttaccaagcatactgcctgcaaacatatttttaacaaagcacatcctgcacagccctaaatccattaaaccttgagtcaatacagcacatgtttctgcaagcacagggttggggctagggttacagattaacagcatctcaaggcagaagaatttttcttagtacagatcaaaatggagtttttatgtcttcctttttctacatagacacaataacaatctgatctatctttctttcccccacaatgctgaaatctctctgagcctactctggcttcacaggctactcgatttgcaaatcactctttgttcaattaaactctgttgaatttaatttctccaaagtttttgttttattttaaacattttcctcaaattttttctatcattaaaatgaataatgtgctcttgggctttgattttctaaattcatccctcagctattttcccaaattattttgtcctttcataatgcttctgcaattttttttttttttttttttttttgagacagtctcactctgtcgcccaggctggactgcagtggtgcaatcttggctcactgcaacctccacctcccaggttcaagccattctcctgcctcagccttctgagtagctgggactacaggcacgtgccaccatgcccggctaatgttttgtatttttattaaagatggggtttcaccgtgttagccaggatggtctccatctcctgacctggtgatttgcccgccttggcccaagagtgctggcgtgagccaccgcacctggctacatctgttttctaatcagtactgccactccctgggtttgtcaccttgaaaagatttgttcacttatattaacatcagttttttaactgtaaattgcattttattagtagagtttgaaaggtaaagtatttacaaggacataaaggcggtgagtttcagaaaaatctaataatatatttctttggttaaaaattctcatttacctatttctttctttctttcttttttttttttgagacaaagtctcactctgtcacccaggctggagtgcagtggcgtgatctcggctcatggctgcctccgcctcccgagttcaagcaattctcctgcctcagcctctgcagtagctgggattacaggcacctgccaccatgcccggctaatttttgtttttgtttttgtttttgtttttttttagtagagatgggtttcaccatgttggccaggctggtctcgaactcctgacttcaggtgatccccccacttcggcctcccaaagtgctgggattacaggcatgagccaccacacctggcctactttttttctttctttctttttttttttttttttttgagacaaaggctcactctgtcgcccaggctggagtgcagtggggcaatctcggttcactgtaatctctacctcccaggttcaagcgattctcctgcctcagccccctgagtagctgggattgctggtgcacatcaccacgcctgggtaatttttgtatttttagtagagatgggctttcaccatgttggccaggctggtcttgaactcctgacctcagtgatctgcccacctcggcctcccaaagtgctgggattacaggtgtgagccatggcacccggccttgcctggataattttttaatttttaatagagacggggttttgccatgtgggtcaggctgatcccagactcctgacctcaggtaatccatttgcctcaatctcccagagtgctgggattacaggcatgagccatggtgcccagactaaaaattctcatttttgctttccctgggtgaatttagaaattttctcagatgtgttttttttatggctgggtgatttccaacagaattccaaggcatagctattagaatgctagctaccaaggataaaataagggaaatctctcttctattttggctgcagaaaataaatacatttccacaagaaaatgtggtaggtaattagtgagtcacatagattcattaaaacatcagtttctctttttacaaggtaaattcgtgacagtgaatatttttgttgtatatcctgtgatttttatttctgagcttcatgctaaattttatgagataaaacttgaggccaggcacagtggcttacgcctgcaatcctagcactttgggagtccgaggccggcagatcgcctgagctcaggagttcgagaccagcctgggcaacatggtgaaaccccgtctctactaaagtataaaagaattaggcgggtgtggcatcatgtgcctgtagtcgcatctactggggaggctgaggcaggagaattgcttgaacctgggaggcggaagttgcagtgagctgagattgcaccactacactccagcctgggtgacagagcgagactccgtctccaaaaaacaaacaaacaaacaaaaacttggtacctcctagaaatgttcacatatgactaattgtttactacatgatttttcatgaaaataatgcaataatacatttattatctgaagggaatagatgcttttgctttccttgttgaggtatgaaatataagcaccttaaaatttcctttcggtggggcatggtggctcacgcctgtaatcccagcactttgggaggccgaggcgggcggatcacgaggacaggagattgagatcatcctggctaacatggtgaaaccctgtaataaaaatacaaaaaatattagccgggtgtggtggcacgtgcctgtagtctcagctactcaggaggctgaggcaggagaatcacttgaacccgggaggcagaggttgcagtaagccaagatcgtgccactgcactccagcctgggtgacagagcatgactccatctcaaaaaaaaaaaaaaaaaaattcctttttttacatgaaaatagtgtttgagtaattttgctagatttttcaaagattttcaaaaaccaagtgagtggctgggcatggtggctcatgcctgtaatctcagcactttgagaggctgaggcaggcggatcacctgaggtcaggagttcaagatcagcctggccaacatggtgaaaccccgtccctactaaaaatacaaaacagccaggcatggtggaaggtacctgtaatcccagctactcgggaggctgaggcgggagaattgtttgaacccaggaagcggtggtagcagtggctgagattgtgccactgcactccagcctgagcaaaagagtgagactccatctcaaaaaaaaaaaaaaaaaaaaccctctctctctctttgattgtcacacccaggctggagtgtgacaaaaacaaaactaataggtcaaattcagcatgcaggaagaagcacaggaaaatagagagagaaaagaaaaaagaagaaaaacaacaccaagttactctaagtactgtggaaataaactgaaagtggggttagagaaaaaaagaaagaagaaggtccaagtagttccaggtacttgggaggctgagatgggaagaccaactggacgtgaccagtgaatcacagtctgcatggacctgaatggtacaggcgccagtgagagccatctggtcgaccttagacatggcaagctgacagccaggtccaaagctcatggccaacatctctctcaaaataaataaacaaaaaaccaacagtaaattttaacaataacaaagaaataataacaagcaataagaccaataaataagtagaagtaaacaaacgtaaaaggtaattaatatcacaattagttgttctctctctgtttctcagtttctgtctttctgtttctctgtctctctctcccttgatctctgtgtgtcacactatcacacccaggctagagtgcaggtgtatggttacagctcactgttgattgcacacctgcactcaagccatgatgtgacagagtgagaagacctagctaaatagaaatatatataacatcaacttcagcatctaggaaggagcataaaagattttaaaaagagagagagagaacaaaggacacaaaagaaaaactacggcaactctctctaagtactgttgaagccaactgaaagtggggctagaaaaaaaacagaggaagaaggtttgagtagttttacatacttaggaggctgaatggaaagaccaccagggtgagactggggagatcaaggctatagggaatcacaatcacatccttcctttggacctgaaaagtactgccactggttatagctatctggtccacctgagacatggcaagctggcggccaagtccaatgctcatggctgaagtctgtctcaaaataaataaactaacaacagtaaatattcaacaataaagaaataataaaaaacaataataagacaaataagtgggagggaacaaagataaaaggtaattaatatcacaattaattgtctctctttctgtctctctctcccttgatctccatgtgtcacagtttcacacccaggctggagtgcacatgtgtggtcacagctcattgctgatcactcacctgcactccagccagggcgtgacagagtgagaagacccagctaaaaaaaaaaaaaagaaatctaaaacatcagtttcagcgtgcagaaaggagtgtaaggaaatgaaacaaagagagcaaagaacaaaggagaaaaaccacagcaactccctctaagttctgtggaagcaaactgaaagtggagttggaaaaagaacagaggaagatccaagcagtttcaggtacttaggaggccgagatggatgggaagaccacctgggcaagaccagggagatcaatgccacaatgaatcacagttgcatctctttccagccatgctcagtggctcacgcttgtaatcctggtactttgggaggccgaggcgggtggatcacgagatcaggagatcaagaccagcctgaccaacatggtgaaaccccatctctactaaaaataaaaaaaaaattagctgggcgtggtggcgggtgcctgtaatctcagctacttgggaggctgaagcaggagaatcatttgaaactggaagggggaggttgcagtgagccgagattgcgccactgcactctagcctgggcaacaagagcaaaactccatctaaaaaaaaaaaaaattgcatccctctgccttacctgagtaatatgagcaatactgctgccggtgagagctatctggctgaccttagacaaggcaagctggcggccaggtccaatgctcgcagctgacaactgcctcaaaattaataaacaaatgaccaacagtaaataataataacagagaaatgataatgaacaataatatgaccaatcaataaataaataaatgggagtgaacaaaggtaaaaggtaattaatatcacaatttattgttgtctctctctgtctctatttctctgtctgtttctgtctgtctgtgtctctgtctgtctttctgtctctctctttgatctctgtatgtcacactgtcaaacccaggctgaggtgaaggtgtgcagtcacagctcactgctggtcatgcacctgcactccagccagggtgtgacagagtgagaagacctagctaaaaaattatatatgtgtataaaacatcaacttctgcatgcaggaaagagcgtaaaaaaaattaaaaaaaaaagagagacagcaaagaacaaaaagaaaaactacagcaactctctcaaagtactgtggaagcaaactgaaagtggggttagaaataaagcagaggaagaaggtctgagtagtcccaggtactcgggaggccaagatgggaagatcagccccgtgagactggggagatgcaggctgcagtgaatcatgatcgcatccctctgctggacctgaatggtactgctgccagcaagagccaaatggtcgaccttagacatggcaagctggcgaccaagtccaacactcgtggctgacatctgtcataaaatgtataaacaagaaaaccaacaatatatatattttttgagacagagtcttgccctcattgcccaggctggagtgcaatagtgcaattttgtctttccgcaacctctgcctcctgggttcaagcgattctcctgtctcagcctcccaagtagctgggattacaggcatgcgccaccacgcctggctaattttgtagttttagtagagatggggtttctccatgttggtctggctggtctcgaactcccgacctcagttcatccacctgcctcggcctcccaaagtgctgagattacaggcatgagccacctcgctcagcccataaatatttaaaaataacaaagaaataacaataacaagaccaataaataagtaagtgggagtgaacaaaggtaaaatggaattaatatcacaactaattgttgtctttctgtctgtctctgttttggtctctctgccactgtctgtgtctctgtctctctgtctatccctctctccatcaatctctgtgtgtcacactgtcacacacaggctggagggcaaggtcacggtaatgactcactgctgattgaacacctacactccagccagggtgtgacagagttagaagacctacaaaaaataaaattaaattaaacatccatgtcagtgtggaggaaagaaggtagcaaaaaataaaagaaaaaaagaaacagagcaaagaacaaagaataaaggccacagcaactccccctaaatactgtggaagcaaaatgaaagtgggggtagaaaaaaaaaagtaggaagatggactgtgtagtcccaggtaaatgggaggctgagatgggaaaaccttccggatgagaccacgaagatcgttgctgcattgaatcatgattgtatccctctgctgggcctgaacaatagtgctgccaatgagagccatgtggtcaaccttgacaccagcaagagccatcagtttgaccttagacatggtgagctggcgactaagtccaacactcgcagccgacatatgtcacaaaataaatatacaaaaaaaaacaacagtaaatatttaacaataactaagaaataataacaaacaatattaaagactgttgggaacaggctcccaaatctggccataaacaggccccaaaactggccataaacaaaatctctgcagcactgtgacatgcttgtgatggctatgatgcccatgctgaaggtttttggtttaccagaatgagggcaaggaacacctggccaacccagggtggaaagccgcttaaggcattcctaaaccatgaacaatagcatgagcaatctgtgccttaaggacatgttcctgcagcagataactagccagagcccatccctttgtttcccataaggaatgcttttagttaatctataatctatagaaacaatgcttatcactggcttgctgtcaataaatatgtgggtagcactctgtttgtggcggtcagctctgaaggctatcagccccctgattcccactctgcactctgtatctgtgtctgtgtctttaattcctctagcgccactgggttagggtctccacgactgagctggtctcggtaaaagaccaataaataaatgagagtgaacaagggtaaaaaataattaatatcacaattaagatattcttctctctctctctctgattatcacactcaagctggagtgtgacaaaaataaaaaaaatctaagaggtcaacttcagcatgcagaaaggaacatagaaaaatagagaaaacaacaaagatttaaaacaacagcaagtcactctaactactgtggaacaaactgaaagtggggttagaacaaaaacagaggaagtaggtcctagtagttgcagggactctagaggctgagatggaaagatcacccatgtgagaacaagactgaggctacagagagtcataatcacatcactctgctggacctgaaacagtatggccaccagcgagaaccatctggtcaaccttagacatggcaagctggcagctaagcccaatgctcatggctgatatccatcagaaaatatataagcaaaaaaaccaacagtaaatatttaacaatatcaaagaaataataacaaacaatactaaacaccagtaaatcaataagcaggagtcaacaaagataaaaagtaattaatattacaagtaagatcttcttcactctctctctctctctctcttcatttgtcacacccagctggagtgtgacaaaaaaatctaaaaggtaaacttaagcatgtagaaaggtatgtagaatagagagagaaagaaaacaagtaaaataacagcaagtcattctaagtactctggaaacaaactgaaagtggggttagaaaaaaaaaaaggaagaaggtctgagtagtcccaggtactcatgaggccgagatgggaagaccacccaggcaagactggggagatctcgatcacatccctctactggacctgaagggtactgccacaggtgagaaccatctggtcaaccttagacatggcaagctggtggctaagaccaagggtcatggctggcatctgtctcaaaattaataaacaaaaataccaacattacacatttaacaataacaaagaaataacaatattaaggaccaataaataaataagtgggagtgaaaaaaataaaaggtaattaatatcacagttaagatttcctctctctctctctctctccttttgtcacacccaggctggagtgtgacaaataaaaaataacctaaaaattcaactgcaatgtgcgcaaaggactataggaaaatagagaaaagaacaaacaagaaaaacaacagcaagtcactctaagtactgtgggacaaactgaaagtggggttaggaaaaaaaaaaggaagaaggtctgagtagtccaaggtactcaggaggctgagatgggaaaaccacctgggtgagactggaaagatcaaggctgcagtgaatcaggatggcatccgtctgctggatctaagtgggactgctgcttgcaagagccatctggttgaccttagacatggtgaaacatgaggcatctggaggaccttagacatggcaaggcaagagccatctggttggccatagacatggcaatctggtggctaagcccaatgctcacagccgacagctgtctcaaaataaataaacaaaaaacccaacaataaatatttaacaataacaaagaaataataacaaacaatattaaggaaaataaatgagtgaaaaaggtaaagaggataataaatatcacaatcaatattatcccctctttttttctctctttctccatttgtcacacccacgctggagtgtgacaaaaaaaaatagttaacttcagcttataggaaggagtgtaggaaaatagatagagaaagaacaaagaagaaaaacaacagcaagtcactagaaatactgtggaaacaaaccgaaagtggctttagaaaaaaagagaaagaagttccgagtagtcccaggtactcaggaggctgagatgggaagaccacgcaggtgggaccaggaagactgaggctgcagagaatcatgatcacatccttctgctggacctgaatggtattgccacttggcaagagccatgtggtgaatcttagacatggcaatggaggagccatcttgttgacctcagacatgtcagggcaagaaccttctggtcctgcctccagtttccctctccaaaatggatttatgttttaatatatttaataattctaatattgaaataactttatttagtttttattcatcaaaaatactaattttctgtataattaatggttagatttaatttaattagatttaaatgagaaattgccacaatcaaaactttttaaaagtacaactgtattttatagttataaaatgtacaaaatatgcaaaaattaaaaataaatttgtgacatattaaagtgtatctgtgtctgtaagattgagaaacatagtggataagcacattgtctactcctgaaactttctttttataatgaggtgactttagaaatgtcattcagccttcttttgtttaatatctcctcacctgtaaaaagggaacaataaagcacgttgtagatttatgataaaaatacatgtaaaacttgttatagtattctagagtagtactataatatagtgggaatatatgtttttctttttagaacaaaactgttacaaaaaaaggggttcaataaaatatttctgagttggaaacaatggcaagtatacggcagaatgttttggtttcctccataaagcagacgtcatctgtccatgaaagatctcctcacttggaatgaaattataagtcacttgaaaataacagattgtctccagtaatatagcagtaggaatgatcttatctcagaccatagttaaatagctgggattttttgtttcttggcatcagagttttctttatttaccacatgcacattatgatccacagatttgattctcaagcacctgactatggccaactccttggtactctctaaaaaaagtcctttagatgatgactgatttggagttgaaatattttctcagtaatattaaatagaaagtgttttctatgttcagagagtggccagagcatgtgcattgacaccatctgcctcttgagtatctcccaggccatcaccatcagccccaaaaacctcatgtgggcatagcttaaactacatgattccaaatatatttgaatctctaatatccaaattatgtgctgaattctgaataggcttataaatgtcatttttcctatgtatgttactggcaaatggaacacaataaacaacacaaaaattatttaaaacactgttctggagtagttaataacagaattccacatttatcacatgttgtgcttttattattttttaatgttttgtgtttggaacttttaacctgggccagcagctccatgacttttatcctgttcaacacaagtagtggggtccaacacattcataggtccaacaccactcctaaattctcacctgagtccacagtcacccaaaacatctttgtcctaaggagcacctttgtattattttacactctcttctacatcttttcagtatatacgttttttttaatttttttatttttttattttttagtatttattgatcattcttgggtgtttctcagagagggggatttggcagggtcataggacaatagtggagggaaggtcagcagataaacatgtgaacaagggtctctggttttcctaggcagagggccctgctgccttccgcagtgtttgtgtccctgggtacttgagattagggagtggtgatgactcttaacaagcatgctgccttcaagcatctgtttcacaaagcacatcttgcaccgcccttaatccatttaaccctgagtggacatagcacatgtttcagagcacggggttgggggtaaggttatagattaacagcatcccaaggcagaagaatttttcttagtacagaacaaaatggagtctcctatgtgtacttctttctatacaggcacagtaacaatctgatctctttcttttccccacatttcccccttttctattagacaaaaccgccatcgtcatcatggccctttctcaatgagctgttgggtacacctcccagacggggtggcggccgggcagaggggctcctcacctcccagacggggcggctgggcagaggcgccccccatctccgggacagggtggcagccaggcgggggctgcccccacctccctcccggactgggcagctgctgggcggagacgctcctcacttcccagatggggcggctgccggatggaggggctcctcacttccccgacggggcggctgccgggtggaggggctcctcacttctcagacggggtggccgggcagagacgctcctcacctcccagacggggtggcggtcgggcagggacactcctcacctcccagatggggtggcggtcgggcagaggtgctcctcacatcccagacggggcggccgggcagagacgctcctcacttcctagacaggatggcagccgggaagaggcgctcctcacttcccagactgggcagccgggcagaggggctcctcacattccagacgatgggtggccaggcagagacggtcctcacttcccagacggggtggcgaccgggcagaggctgcaatctcagcactttgggaggccaaggcaggcggctgggaggtggaggttgtagcgagcggagatcacgccactgcactccagcctggtcaagattgagcactgagtgagcgagactccgtctgcaatcccggcacccggggaggcccaggcgggcagatcactcgcggtcaggagctggagaccagcccggccaacatggtgaaaccccatctccaccaaaaaatacaaaaaccagtcaggcgtggcggtgcgcgcctgcaatcccaggcactggcaggctgaggcaggagaatgaggcagggaggttgcagtgagccgagatggcggcagtacagtccagcctccactcggcatcagagggagaccatggaaagtgggagacgggagagggggagggggagggggagggggaaggggagggttcttttttataatccaagttgttggcttatgaaaaactctaaactgatcactgcttgttttttctatagtcaggtccattgttctcataagccatgaccccagaatatccaggataacctcttcctgctatggaaggaatatacagtttcctaagatgatcacatagatctacattttatgtggaattatttttttaatgtgcagaccttcattcattattttatgcagaggtttaattaccacaaagagcagtcacatatcagagaacccatgagtcaccgactgagtccctgccctcatagaatttattatatggtagcaatgacagttacagactaaatgttttgaatagttctttgataattttctatttactaaatgttataataaagaaatttagaggccaaaattttattttaaaatggggcctctagtaatttggagacattggaaaacttatatgggtatgtagctttaaactaattaatttaaaacgtccactgggagctgtggctcatgcctgttatctcaacactttgggagtctgaggcaggtggatcacctggggtcaggagtttgagaccagcctggccaacatggcgaaaccctgtctctactaaaaatataaaaattaggtgtagtggtgtgtgcttctaatcccagctactctggaggctgaggcagaagaattgtttgatcccgggaggtggaggttgcagtgagccaagatagtgccactgcactccagcctgggtgacagagcaaggctctgtctcaaaaaaaaaaaaaaaaagccataaccggttcataggtacatcaagatggtagaatagaaggcttcaccaaccttcccccctgtaaggacaccaatttaacaacaacctacatttaaaatcaccttcataagaaacaaaaatcaggtgagcactcatggtacctggttttaacttcatattgctgaaagaggcactgaacgggtaggaaaaacagtcttgaatctcttacactatttctcccacatcccccaacaatggtggcatggtgcagaaagggagagttcagcaattgtgaggcattgaattcagtgctttcatgttataacagaaagaaaaaccaaacaaaactcagcttacacctgctgatggaggaattatttaaaccacatagttaaatacagttgctggtaatagtaagtacacagaaaatcaaataatattataacactgtaactgtgatgtatgaactactcttatgcaaggtagaaagactaaacaataaaccaatcaaaaataacaactacaacaacttttcaagacatagacagtaaaattacatataaatagaaacaacaaaaagtaagggaaaagaattaaagcatagagattttattattctttttgcttctttgtttattcaaacagtgttaagttgttattagattaaaataataggttataagatagcatttgcaagcctcatggtaagctcaaaccaaaaaacatacaaggaatacgcaaaaaataaaaagcacaaaactaaatcatatcaccagagaaaactaccttcactaaaaggaagacaaaaagcaaagaaagataaaagagaagaccacaaagcaaccataaatcaaataaaatggcagaagtaagttcttgcttatcaataataacattgaatgtaaatagactaaactctccagtcaagacagaggggatgaatgtatataaaaacaagacatatttatcctttgcctgtaagaaattcacctcatctatgaagacacacatagactgaaagttttagaagtggaaaaagatattcaatgtcaatggaaacaaaaaaaatgcggtagtagctatacttaaacattagaaaaatagattttaagacaaaaattataagaaaagacaaagaggttactatataatgataaaggggtaaagttaacgagactataacaattttacatataaatacacccaactcttgagcactgaaatatgtaaagcaaatattattagagccaaagagacagatagactccaatacaataatagctggagactccaacactccactttcagcattgaattggtattccagacagaatatcaacaaagaaatgttggacttaatctgtgctatagatcaaatgtatctaatagggatttagagaacatttcatgtaatggttgcagaatatacattcttttctttagcacatggattattttcaaggatagactatatgttaggccacaaaacaagtcctaaaacattcaaaaacttgaaataatatcaaatatcttatttgtccacaatggaataaaattagaaattaataaaaagaggaattataaaaactatacaaatacatgaaaaatcaacaatatgctcctgaatgatcagtgggtcaatgaagaaattaagaagaaaattaaacattttcttgaaacaaatgataataaaaacactacgtatcaatatctatgggatacacaaaagcagtactaacaggaaagtttataggtataagtgcctacatcccccccccaaaaaaatctcaaatacacaacctaatactgtatcttagagaactagaaaagcaagagcaaaccaaatctacagttattagaagaaaaaaatcataaagattagagcagaaaaaaaattgaacaaaaaatacaaaagatcaatgaaaaaattggcttttttgaaaagttaaaaattgacaaaccttcaacaaactaaaaaaaattttaaatccaaacgtaaaataatttaacaaacaaataaactatgatacaagagggcaaatgagtgaggcctacaggctccagggcaatgtaagagacctcagaagcctcctgtgcttccttgtttgcctccactgttctgaggtatccagttaactcacaagttcatcatcccagcctggaaaatgactctggttccacttccaaaaaagaaccccagagctatgacagggatggtcttcagagcagtgatctgatgctctgccacattctacactagcctgagtgctcagtcccacaaacccccaagcaaatttctgctctgaaaggcctccagaggatatggagaaatttccaaggatctgagagtacagtgggtaattgatagacagcaaggtcaactcacctttttgagcgttcgaaatttagatgccacccaggtcaattacttcaatttacagagaaaaatttgaggtttttcactactgtattccccttcatactgtgtgtagggggattactcccaattttaattacacagagcaatgaatgcagaaactaagtttttgtcctctaaaagctttcctggggatggccacagaacaggcagatccatgggaaccttgaggttcccaagtcatcagcctgttatcttttctcctccccatgttataggtcctgggcatgttacccaggagactgggtgcccctaccccgtggcagagctgccctcatcctctgtcttcttgtcactccatcagtgttaactgctcttctgacctttaacctgagaagtctgtgtgtgtgtgtgtgtgcacgctcatgcacggaaacctgtgcaagtttaatggtgcagatatgagtgtgctccatacgagaaaattggcagaaattctcaagatctcagggactctcattctcaaagcaaaccccgtgatagcgatgagccctggcctatgaggtcagaatgctcttttatcctctggactctgccaactttatgttctctgggccagtctctgcttctctccagacctcagtttcccagttatccagtgagatgttagatgtcaaagtgtttaagccacagctcagcatgcacacggtgcaagctccctaccaactaggatgggtgtagcagggctgtgatcagggtgtacccagatcttcctcagttggacagaaatagatgagttctgcactgggcagctggaccttctgtccaaaaaaggtcacgcgcacaggatccttcaaggaccacagacaatgtgcgcatatgagacccacctttatcccccagcagctcccactggagcatacccaatatgtcccctgtcctctgcatctagaaagtggtgacatcctcacttaacacatggactgatggaccctttgtggtggagtagtcccacaaagagaatctgagatgctattaactgtacaaggaactatggatgtgggccatatgaaggcactagaacttcagaattaaatcttccccactcctgcctccaccactatgcagataaaaaaatggtccttggaaagtgatatgtcttaccgaagattaccagggattccatgtcaaagctagcactttggttaggattacatttgcctataagtagaaggatgcccaatataacagtagtgcagacaagatacagaatgctttctttctcataaataagaatcttagagctggacagtccatgactctggactgtgcaccaaggcagtcaaaaattatctttttgctactttttttttctttttctaacttttaagttcaggggtacatgtgccggatgtgcaggtttgttacataggtaaagatgtgtcataaagattggttgtacagattgttttatcacccaggtattaagcttactatccattagttattttttctgcttctctccctcctcccactcttcacctcacaatatgccttagtgcatgttgttcccctgtatgtgtctgtgtgttctcatcatctagctcccatttataagtgaggacttgcagtatttggttttctgtacctttgttagtttgctaaagacaatgacctccagcttcatccatgtctctacaaaggacatgatcttcttctttttttatggctgcacagtattccatggtgtatatgtactatattttctttatccagtctatcactgatgaacacatggattgatttaaggtatttgctattgtgactagatctgcaatgaacgtgtgcgtgcatgtgtctttataatagaaagacttatattcctttgggtatatactcagtgatgagattgctggggtgaataatatttctgtctttaggtctttgaggaatcatcacactgtcttccacaatggttgaactcatttacactcccaccaacagggtaaaaatgttcctttttctccacaactttgccaacatctgttattttctgagtttttaataatagccattttgactggtataaaacagtatctcattgtggtttggatttgcatttctctaattattggtgatgttgaggttttttcacatgctttattagctgtgtgtatgtcttttgagaagtgtctcttcctgtcctttgcccactttttaatggggttgtttgcttttttcttgtaaatttaagttccttgtagatgctggaaattaaatctttgtcaaatgcatagttcacaaaaattttctcccattctgtatgttgtctgcttactctgtaggcattttttttttttttttttttttgctgtgcacaagctcttcagtttaattagatcccatttgtcaatatttcctttgttccaattgtttttggcatcttcatcataaaatattagcccatgcctacgtcctgaatcgtattgcctaggttgtcttccaaagtttttatagttttgggttttatatttaagttttaaaccatcttgacttaattattgtatatagtgtaaggaaggagttcagttctttttttaaattttactttaagttccaggatgcaagtgcagaacatgcaggtttgttacataggtatacatgtgccatgtggcttaccgcagcaatcaacacatcatctaggttttaagccctgcatgcattagctatttgtccttatgctctccctcttctcgccccccatcccctgactagccctgatgtatgttgttcccctccctatgtccatgtgttatcattgttcaacttccacttatgagtgagaacatgtggtgtttggttttctgttcctgtgttagtttgctgaggatgatggaggaagggggtcagtttcaattttctgcatatggctagccagttatcccaacaccatttattgaatagggagtccttttcccattgcttgtctttgtcaggtttatcaaaaatgagatagttgtagatatgcggtcttatttctgagttctgtattgtgtttcattggtctatgtctgttcttgtactagtaccatgcttttttggttactgtagcaccttagcatagtttgaagttgggtagtgtgatgtcttctgctttgttctttttgcttaggattgtgttgactattcaggttctcgtttggttccatatcaattttaaaatacatttttcttgttttgtgaaaaatgtcagtggtagtttaatgggaattctattaactctacacatttacttgggcagtgtggccattttaacaatattaagtcttatatcatctttgtttttttttttttttgagttggagtcttgctctgtcacctaggctgaagtgcagtggtgtgatcttggctcactgcagcctttgcctcccaggttcaagcgattctcctacctcagcctcctgagtagctgagattacaggtgtgcaccaccgtgcttggctcatttttgtatttttagtacagatgtggtttcaccatgttgctcacgctggtctcgaactcctgaccttgtgatctgcccacctcagcctcccaaagtgctgggattacaggcatgagccaccatgccctgctctgatttctttgagtagtgttttatagttctccttgtagaggcctttcacttcctttgttagatgcattcctaggtgttttattctattcatggtgattgtgaatgggagtttattcaggattttgctcttggcttgattgttgttggtgtataagaatgctagtaggccgggtgcagtggctcacacctgtaatcccagcactttgggaggccgaggtgggcggatcatgaggtcaggagatcgagaccatcctggctaaggcagtgaaaccccatctctactaaaaatacaaaaaattagccggcatggtggcgggcacctgtagtcccagctacccaggaggctgaggcaggagaatgacgtgaacccgggaggcggagcttgcagtgagcaaagatcgcgccactgtactccagcctgggaaacagagcgagactccgtctcaaaaaaaaaaaaaaaaaaaaaaaaaaaagaatgctagtaatttttgcaccttaatttttcatcttgagactttgctaaagatgtttatcagcttaagaagctttggggctgagacgatggggttttctacatgtaggatcatgttgtctgccatcaggcatagtttaactccctctctttctatttgaatgccttttatttctttctcttgcctgattgctctgaccaggactttcaatactatcttaaataggagtggtgagagagggcatccttgtcttgtgccggttttaatggggaatgctttcagcttttgccctttcagtatgatgttgtctgtgggtttgttatatatggcttttattattttgaggtatgttttttcaatacctagtgtattgagagtttttaacatgaatggatgttgaattttattgaaagctttttctgcatttattgagataatcatgtggtttttgtctttaattctgtttatgtgatcaatcacatattgatttgtgtatgttgaaccaaccttgcatcccatggatgaagcctacttgattgtggtggataagcttttttacatactgctggattttgtttgccagtattttgttgagaatttttgcatcaatgttcaccaagaatattggcctgaagttttctttttgtgtgtatgtctctgccaggttttggtaccatgatgatgctggcctcatagaaagagttaggaaggagaccctctgtttcaattctttgaaacagtttcagtgggaattttaccagctcttctttgtaaatttcgtagcattcagctgttaatctttttggtcctggggtgtttttggttggccggctctttattattgcctcagtttcagagcctgttatttgtcttttcagggattcaatttcttcctagtttagtctcgggagggcatatgtgtccaggaatttatccatttcaactagattttctatcttatgtgcatagaggtgtttataatattctctgatggttatttttatttctgtggagtcagtgataatatcccccttattatttctgattgtgtttatttgaatttttgatcttttcttccttattagtctatctagtggtatatctatattattagattttttaaaacaaacaaacaaacagctcctgaatttgttgatcttttgaatggtttctcatgtctctatctcctttagttcagctctgattttggttcttttttttttttttttttttgagatggagtcttgctctgttgcccaggctggagtgcagtggcacgatctcagcttgctgcaagctccgcctcccgggttcacaccattcgcctgcctcagcctcccgagtagctgggactacaggcacctgccactatgcccagctaattttttgtatttttagtagagacagggtgtcaccatgttagccaagatggtcttgatctcctgacctcgtgatctgcccacctcagcctcccaaagtgctgggattacaggcgtgagccaccatgcccagtgattttggttatttcttgtcttctcctagctccaggatttctttgctcttgtttctctagttattttagttgtgatgttaggttgtcaacccaagatctttctagatttttgatatgggcatttagtgctataaattttcttcttaacattgccttagctgtgtcccagagattctggtatattttgtctttgttctcattagtttcaaagaacttcttgatatctgccttaatttcattatttacccaaaagtcattcaggagcaggttattcaatttccatggaattgtatggtttttagtaagtttcttagtcttgagttctaatttgattgtactgtggtctgagacattgtttattatgatttcagttcttttgcatttgctgaggagtgttttactatgtgactatgtgaccaattttagacaaagtgccatgtggtgaagagaagaatatatattctgttgttttggggtggaaagttctgtaaatatctttcacatccatttgattcagagctaagttcaggtcctgaatatctttgttaattttctgtctcaataatctgtctaatattatcagtggggtgttaaagtctcccactattattgtgtgggggtataggtctctttgaagacctctagaaacttgttatagaaatctggttggtcctgtgttcagtgcatatatatttagtatagttagttcttcttgtttaattgaaccctttgccattatgtaatgcctctatttgtcttttttgatctttgttggtttaaagtctgttttgttggaaactaggattgcaacccctgcttttttctgttttccatttgcttggtaaaatttcgtccatttctttattttgaggctatgtatgttattgcatgtgagatgggtgtcttgaagacagcataccagtgggtcttggttctttatccacttgccactctgtgtcttttaactggggcatttagtccatttacatttaaggttagtattgtaatatgtagattcaatcctgtcatcttgatgctagctggttattttgcagacttgtttatgtggttgatttatagagtcactggtctgtgtacttcagtgtgtttttgtggtggctggtaataattttttctttccaaattagtgcttccttcaggagctattgaaaggcagatctggtggtaatgaattacctcagcatttgcttgtctaaagggaatgttatttcaccccagcttaggcttagtttggcaagacatacaattctgagttaaaatttcttttctttaagaatgttaaatattgacccacaacatcttttggcttgcagggttttaactgagacgtctgctattagtctgatgggcttccttttgtaggtgacctgacctttctctctggctgaccttaacattttttcttttcatttcaatttcaactttggagaatctgatttttatatgtcttgggtatgatctgtctatggagtatctcactggggttctctgcattttctgaatttgaatgttggcctggaaagcaagattggggacattctcatggatgatattctgaaatatgttttccaaattagttccagtctccccagctctttcaggtacaccaatcagttatagatttggtctctttacataatcccatttttctcagacctctgcttggtctattctgctattaatacttgtgattgcattatgaaattattttattgtgtttttcagctctaccaggttgattaggtacttctctatcctagctactttgtttgtcagctcctgcaatgttttattataatttttagctttcttgcattgagttagaacatcctcctttagctcagtgaagttcatttatatccacattctgcggtctacttctgttatttcagccatgtcagcctcagccccattctgaacccttgctgaagaagtaatatggttatttggagaagggagggcactctggcttcttgagtttttagtattcttgtgctgattctttcttacctttgtgtgcctatctacctttaatctttgaggttgctgacctatgaatgggagtttttgtttgtttgtttgtttgtttgtttttaactatttggccattctttgtagagctgctgcagttagttgggcatctgccccagttcctagttcttggatttttcagtatctggaggtatcaccactgaaggctgtgaaacagcaaatatagcagcccactctttcccttgggagctccatccccaggggaggtgcagacatgttgctggcccaaacacatctggaggaggcgactggagatcccagttagaaggtctcgcccagctaggaggaacagaattggggacccacttaaagaagcagtttagccccactttaatagagcagccatgctgtgctggggtaccatttttgcccctcatcagggtgggctctcccaagcctggaggctgaaacagctacattgcaaaacagcaaagatgttggcccaaccctctctctaggaactatgccccaaaatgttttcaaacctctgttgcccagagaacatcagtgggagtagctggaggctctggttgggaattatctctcagagatgaggagcatatcatagtcccgcttaaagaagcagtctagtcacattatggtagagccactgtgctatgctgggagattccttctgtcccttgatgatttggtctctcctaagcccacaggctagaatggctgagttgtccaaacaccaaatacggtgtcccactccttccactaggcactgcatcccagagagaaatcaaatccctgtctgccagagaatatgggaggggccggctggagtccctgataggaggccccaccctgagacaaaaaatgtgtcagggttccacttaaagaagcagtctggccacattttggtagagccactgtgctttgctggaggtttctttccataggctgtcagttttgtttggactttcctaaacccacaggctggaatgactgagtcatccaaacagcaaatatggcagcctgcccctgcctccaggaactctgacccatcccaggtagatgcaatgccattgctggggagtggctggaattcaaagccagtgggtcttatcctgtgaagctctatgaaagtggggtccacagactgatgctgctcagccccatggattcagctttcttcctaggggtgtttacagaggtccaaattcttgcattttctgagtagctttcacctttgccagagatcccggagccagagtatctaaggctcctgagattctgtttgtgcctgagtagttgctctgccaagaccatgcagctctgtgtgtcagaccaaaagccctggtggaatgggttcaagagaaaatctcctgacccaaggatggcaaagatccatggaagaagtgtggttttccaggatcacacagtcactcatcacttccctgggcagggtagtttcccttggctctgtgtcattcatgagtggtcagtggccctgtcctgctttcctccattctccatgggttgagctgtttccttcatgagtcccaaggcaaatacttgggtgtttcagttgaagatgctgcatttactctcttcttgttcctttccatgagagccacacatcgtagctgcttctaatcaggtatctcagcatccttctctgctacaatattttggtagatggtttttatgctgtaggctgtctcatggcccaagatggctgtaggagcaccagcctgcaccaaccaccatgtgcatttcaaagagcaaaggaggagaaaaggtgcaaagtcaaagtgactcacacagctgtgttagcttcaactaaggagtctccccaaagttccatcaatacttctgcttacacccaaatgtcctgaacgtcctctagtcattgtcagcttcaataggggtcaagaactatagtttttgtgtctggtaacttgctgtttgaatgaaacagaatctctctttttaagaatgaaagaaaaataaaaactgtggcaatgaccagtgctcttttgctacactaaattcaaagataaagagaagaagatggagttattctcaggtgaagtgggcacttattttccaaacaaagcctcttttactgtttatttattttcagattagatgggaaaaagtcttcattctgacaagcactccctttatgaccaaaggttagtcaagcttaactgaaccttctttttgactaagccaaccttgacttactaccctactcctggtttgagaagctcattttcagaaatcctgctaagattgcttagtaagaatccacatattctttacagcttctgaaaacttaattccccttccttgatatttaagtcgttagcctgcctgtagccataatcctgttggaaaacaatctctcttcttttggtattttatcaaatttctctcagtaattttttatccactgatctattctttctattgactataaatcctgagttgtctgtgttcagagttgtgatcaatttttgaatcctattaaaatggccataacatctactgcaatagtattaaagtctttctttccaatttttaacaaatgtcagaattaatttatttgacagttgcccaataggatgtttgagtataaaaccagttttcagttccaagaaaaatgatgtggataatatgtagttgtatctgcaagtgtatctgaaaaattatcttctttttcaagtggggtgtgggtgaaagattatggagccaacatgttcctaaaatgctgagtcataattcaaaccatacaaatcaaagaggtagaatgcttggaccccaacatttttaaccttgaggatactttgatgcccatgctcaaaagtattgtgaaactggcggggtgcggaggctcatgcctgtaatcccagcactttgggaggccaaggtgggtggattacctgaggttgagagttcgagaccagcctgaccaacaatggagaaactctgtctctactaaaaatacaaagttagccaggcttggtgatacatgcctgtaatcctagctacttgggaggctaaggcaagagaatcagttgaacttggtggatggaggttgtggtgagctgagattgtgccattgcagtccagcctgggcaacagagtgagactctgtctcaaaaaaaaaaaagtatttttttgttgctcctatgtgtgagcaagaaatttactaaaatcacaactgtcattcaatgccaagtcaaaaatgtttcttttcattccgattaatatagaaacagagataaactagctttaaaggcactaaccaaaattgaaaatgctgactaattccatttaaagcttacatcttttcaggaactgtttatttttgaacatgtgacattggaacacaattttgtaattggtttggttgactgaagaagtgacttcttgaattggggtagaaaagccaaggtctgtaaattgaagatagactgcaatattgaaagcaaatttcagattcctttgcacactttaacttgaaggttaacagatataatatatgtagataaacacatacaaacacatacaatatataaatatatctatgtaatgtccatttatgagtatgtcttataaaaaaaaaggtaagtcagagatcatttccctacttattcttctcaggggaggtgaatacaagcaacccacttactcagccctgattatttcaatcagccaattagctcagcccagtgtattccaattagccaattaatttggtctaggtaattctgatcagccaattagctcagatcaggtaaatccaatcagtcagttacctcattctaggtgatttcaatcagccaattaggtcagcacttttgatttcaatcagtcaattaactcaaatcaggtcattacagtcaattaaccaatcccaggagattaaaatcagccaattagtttagcccaggtgactccagtcagccgatatttgagcccagatgattttaactggccaataagctcagcccagctgatttcaatgtcagttagctcagcccaggtggattcaatcagccagttctctaaatttcaactgtagattaatcaagactggcccccagtggtgcatgagaatagctcatgcatacactgagaaggaaagcaaggtccagaaatgttaacctgcacagaaagtgttacatgactttactatcagcttatttcccaaaccttgcccctgaaagtgaagctttgtctatacaaaaaacattctatacctatgttccattctgacatgctactgagccagagaagagaaataattctacatctgcacccttagaatatgctaagatactgaaaaatgtctttggaggaacaatttttgtgtacatatttacatagaaatactcatataatcttgtatatgtatcaatctttgtatatacattcatacagaacaaagatgtagaaggtggaagaattaataggtactggtaccaatagtaatgcaaatagaaactaggatctcacacatggatcaagtcaattgttgagactacgactcatctatttggatccaacacacaggtgttgactctcatacctagaacccggacctgtgtgagattgttaatctcattattggaccttcctgcaggtgtgattgtgatatatgcaccttcacagaaccttcatgatttgacacatctgcctgggcccagcccagatggaattgtgacatatcactggactcagcccctaggtgatattaccctattcttctgctttagcgctgctcacaggggaattgtaacgtatcaccgggccttatatccaggtgatgtgaatcttctgctttgtcgctgcccacagggggcatttcaacatataactgagccctacacccaaatatgtgactcccttgtctgtgtctggcccatatcagccattgtgacatgttgcttggtctaacacccgagttatataactcttgtgccctggccctgcctacagagagcattgtgagatatctctgtgtccaccagagaggtgatgtgactctcttctcttcgctgttcccttctcaaatgggtgactatgacatatcacgggccaagtgcctagcttatgtgacttttcctttctttatttttttttcttttgagatggagtcttgctgtgtcacccacactggagtgcagtggcgtgatctttgcttactgcagcctctgcctcaaaggttcaggtgactctcctgcctcagcctcctgagtagctagaattacaggtgcctgccaccacacccagccaatttttgtatttttagtagagacagcgttttgccatgttggccaggctggtcttgaactcctgacctcaggtgatctgcccaccttgacctcccaaagtgttgggattacaggccaccgtgtccggccaactttttccttctttacacgttctgcccacaaagaaaagtgtaacatattgctgcactcaacacaaagattatgttactcttttttggttctgctctcaaaacgtattgtgatgtattccttgtcctacctctattgtgatgtgagtcccctgcctggtccctgtccacaaggggcaatgtgatatatctctgggcccatcaaccacttgatgtgactctgctctcttacccgagcattgcccaaaaaagagattggggcctatctgcgaatccagagcttaggtgatatgacccttctctcctgcctgggccatacctaaaacagagagagtgacgtattgcttagtccagcatacatgttgtgtgacacttcttcctgacctctgcccaaacaagtaacagtgactaactcaggttttgttacctaaatgatgtgattctctttttctggggacctgtccacagtgaaggttgtgacaaattgcttggtccagcacctatgtgatgtgactctactctcatgcctgggacctgtccactgggtgattgtaacatacagctgagctcagcttctagattatgtgactctctcctttttcctgagttctacccacagggggtactgtgagatatctctgggcccctcacctaagtgatgtggctctcttgcctgtaccctcccctcagcaggtatggtgacacattgctggacccagcaccaaggtgatgtaactctcctctactacttcggctgtgcccaaaaaaggattgtatagctgggctcaacaaatgagtgaagttactattgtctcatgcctcagctctgtatacactgtatattgtgacatatttctgggtccaacacctaggtgatgtgactctcccgcatgggtcctgcccacaaaactattataatatgtattttcattcatcacctaggtgatgtaacttttctttctgcctgggtcttgccaaaatagaaaattgtgatatatcattggatccagaacccaggtgatgtgcctctcgttttttttgcctgggccctgcataatttgggtattgtgacatatcattgggctcaacccctagcaggtggaaggcttcagtctggaccctgcccacagaagaccttgtgacatgtctctgcatccatcacatgactctcgtcttctgcctgcatcatacccacaggaaagattataacatatcactaggttaagaaaccaactaatgtgttttgactgcctgagtctttcatacagggggcattttgacatatctctggcaacacctactatctgatattactcctcttttttacctgggttttgcccatgtaaaagattgtgacatatctcttgacccagcgcttaggtaatgtgactctgctcttctgcctgggccatgtccacagaaatgagagtgacttatcactagggccagcacacaagtgatgtgattcttctgcctggtctctgcctaaagaggtcattgtgacatgtctctgggcctatcatcatggggattatgacatatcactttgcccagcatctatgtgctttgacagccttctctttaatggacctgcccactagggtgatttgtgtcatggagcagagcccaccttctaggttatgggactttattcttttttgtgaatacccaaaaatggaatatctctgacattctcaccaaggtgactctcttttcctgggccctcttcttaggggcatttgtgacatattgctatacccagaacctaggtaatgtgactcttttttactgcttgggctttgcccaagaagtgcttgagatgtattgctgggcctagcacctaagtaatggtgactctcctctccttccaaaatactgcagacattgtgatatattgctgagtccaacacctagaaggtgcaacttttctgcagaagcactgcccaaaggagaataatgacatatcttttcattcatcatctagatgatgtgactcttctcttctgtctgggccctgccaaaaaaaaaaaaaaaaaggttattgtaacatatcaatggattgagcacctaggtaatgtaactcttctcatttccctgggccctgcatatgttgaatatcatgacctaatgctggtcccaacttatactgtatgagagactcctgcctgggcgatgaccaccagaggccttgtgacatatctttgcacccatcacctaatagatgtgactctcttcctctgcgttcatgctgcttatagaaaagattgctacatatggtggaacccacgaaccaggtgatgtgtctttcatgcctgggtattacccaaaggtaacagtgtgacatatcattgagccctgaatcagggtgatgtgctgctgttgtctgtgccctgcttttagtgtggaattgtaacatatccctggctgagaacccaggtgatgtgtctcttttttctggtcccttctttcagaaaagtttgtcacatatctctggcccagaacttaggtgatgtgactcttctgtttgctccctacacacaggtaggattttgacatatatattggctcagtgcacaggtgcaataatgactctaatattttgaactggctaagaggacaaatactgtctgtcatagctaggtgtagaaaaatgggtaagatcctgggtttcctttctgtatggaggttataaaaggttaccactctctcgcatattgtataaagcccttgggtggtagagagagtgtcatcacaaggcccagcgtgcagatgagattgtgtttcttgtgtgctcatcctgacaaccattaggattgtcaccctcacacatggatgaagcccactggtgaggtacttaatctcacacatggatgcagtccacagttaaaattgtgacattcatttgtgaatttctgtccagagttgtgatggtgactcatttctaaacccagctctggcaggtgaggactctcctatctggacccagccaatcagaaagatgtcgactgtcatacctgggcttaaagctacagacactatcatgagtccataacagcacaaaggatttagaggaagttgtgactcccatgcataccatataaagcccttgggtgataacagaacatgtcttaacatggccctgaacaaaggtaagattgtgacactcttacacacacacagcaaagagtaaagatgatcatcctttcacagcccactgttgagcttctgaatctcatacctggagacagtcaaaagttggaaaattgactctcatgagtggatctggtccacaggttgactgctgtctctcagatcaaaatctagcacacctgtgagactgtgattctaataagggaacacagtacacagaaaaaattgaggctctcatgagtggattcagtccattgtagagattgtggctcatgtatatagaagcaacatacaggaagcattgactctcatacctagaatttggacctttgtggaatttttaatctcatccttggaccttcttgcacgtgtgacatgtgcctcttcccagcacccaagtgatttgactctccttatgtgggcccagcccacagaagggattatgacatatcactgaacccagtagctaggtgatgtgactctactctttccttgacaatgtccacaggggcattgtgacatactggtaggccttgccccccaggtgatgtgagtctcatgttctgccttggtgatgtctacaggaagcattgtgacatatcgctggactcaacaccaaggtgatgtcacttttttgccttagctctgccttcaaaaggcactattacaaattacttggactattaccaaggtgagttgagtttcttgcttggaccgtccccacagtaggcattgtgacatatcacctggaaaatgtgactcttcacctctgcctacaccctgaccacagaaagaattttgacatatcactggatccagaaaccagatgatgtgtttcttttgccaggacctgggtcatagaaaatattgtgacttatctgtgggtctcttacctaggtgatgtgactcactctcttgcctggggccttcactcagagggtattgtgacatattgctggaccaagcatttaggtgatgtgactttctcaacatcttggactctgaccaataaggaatttgtatgtgttgatgtgcgctgcatccaggtgatgtgactctcctctcctgcctgggccctgcacatattgtgtgttgtgacatgttgcatgttatcacacctaggtgatgctactttctcgcataagtcctgctcacagaggcattacgatatattttttatgtctatttcctacgtgatgtgtctctcctcttctgccggtcttgccaaaagtggggattgtgacatattactggacacagattctaggtaacatgacactcctcttttgtctgggccctggatatttagggtattgtgacgtatttttgcactaaacatctagaaaataaaaggctcctgcctgggccttgcccacaggaggcctgtgacatatctctacatctatcatttaggaaatgtgactctcctctttggcctgcaccctgtgcacaggggagatggtgacacatcactgagcctgctcagcaggtgatataactctcttttcctgcctggcccccacgtatattgtgtattgtgaaatgtggctgggtccaacacctaggtgacgtgactctcctgcatgggtcctgcccacaaggttattatggtgtgtcttttgttcatcactaggtatttcaaattttgtcttctgcctaggccatgccaaaaaaaaaaaaaaaaagtactgtgacacatcactggagccagcagtaggtaatgtgcctttgctgattgggtctagccacagaagactttgtgacatatcgttaggcccagcaaccaggtgaagacactctgctgccttagtcctgctttcaggaggggattataccatatccctggctgaaaacacaggtactgtgactctcttgctggtccctactctcaggaaaaattatgacataaccctagcccagcaacaacgtgatatgactctcctgcctggtcactgccctcagagacggttgcaaatatctctggcacagcacccagatggtgtgattctcctgctcactccctccttacccaattgtgggactgtcatatatatcttagttcagtttacaggtgtcacaatgactctcataacttgagccagccaatatgaaagatactatctctcttagctgggcttaggaaaatgggtcaaatctaggtctcatttttgtatgaaggtcatagagaattaaccactgtctcgcatttcatagaaagtccttgggtgatacagagagtgtcaacacagagtccaagacacaggtgaggttttgtttctcatcattttctcacttgaacaaagcccattattgaggtcctgaatcttataggtggacacagtctagagttgagattgtgactatcatacataaacatgtaagcacagttgggatgatgactcattttaaggtcagctcataggaaggtgaacattcttcattctggactcagctaattggagagatgttgactctcatacttgggcttaaggccacaggtacaatcatgattcataccagcacaaatgtctcagagcagattgagaatctcatgcatcaggtataaagccctagggtgatacataggtgagattgtgagactcaccaagtcgacagaaaagattgtcatcttcccacatgaacacagcccattgttaaggctctggatttcacaaccaaaagcagtcaaatgttggaaaattgactcttatatgtgaatctggtccacaggtaggcaggtgattctaagaccaatattcagcacacctgtgaagctgtaacttcacccagataaaacagcacacaggaaagattgtgcctctcatgcacagatccagtttattgttgagatgaactcatgtacttagacccaacatatatgaggtgttaactcacatacttagaaacaggacatggctggattgtaaatatcattctatgactttcctacaggtgtaaatgtgatatatgcctctggccagcacctgagtgatttgacctacagtctgggaccagcccacatacaggattgtgacttatttttggacccagcacctaggtgatgtgactctattatcctgccttggtgctgcccacagggcacattgttggaactcacttctcctgcctggttcctgctcacaggggggattgtgacctgtgactaacccagcacctagctgatgtgactcctcttctttttatgttcttccctcaggggagactgtgatgtatcagtgggcccggaagccaggtgatgtgtctctccttcatgttccttgctaacagagaacattgtaatttactgctgggcttggcatccaggtgaggtgactttgctgcccgtgtcctgctttcaggaggggattgtaacatttatctctggcccaggtgagattgtgacactcttatgcacacaaaactcatagtaaagattttcattcttgcccatgaattcagtttactgcttaggttctgaatctcacattaggaggaagttaaaagttggataattgactctcatacatggatgtaattcacaggtgggttggtgaatctcagactatgattccatgaataagacacagtccacagaagggattgaagttctcatgcacaaattcagtccactgttaatattgtgaattttgtacttagacccaacatacaagaggtgtttgctctcatagccagaacagggacacgtgtaggatctttaatcttatccttgaacctacctgcagctctgattatcacatacacttctgccaagtacctgagtgagaatgtcacaatacaggcaaataccctaggtgtaggtccatgaatgtcacatggaattgtgacatatattcctgcccctagcacctagggtgtatgttttttattcttttgtcttggcattgcccacattgcatcttgtgacatattcctaggtctaaaacccaggtgatgtgagtctcctgcctagattctgcgaacagggggaattgtgacatatttctggacccattatctatttgatgttattctcctctcttacttggtatttgccaacaggtgacattgtgacacatctctgggcccacctaggtaatgtgactcttcttttcttcctgggctctgatcacagaagggagggtaacttgtccctggatgcagcccacaggagatgtgattgttcttgctggttcctgtccataaagacaagagatacacacattgtgatgtatctctgcgaccataaactagattatgtgactctcctttatttccagagacctgtccacagtgcgagttgtgacatatcacttggcacagcatctgtgttatgtgactctcctctcatgcctgggccctgctcactgaggttgtaactgcagctggccccagcccctaggttatttttctcttttcttcatcctgaggcttacccacagaaggcatgtttacatatttttggaaccctccccagatgacgtaactcttcttcctgggctcttttttcagggtgtattgtgccatatttttgggtccagcagcaaggattacctctactgcttgggctttgccctaaaagagattgcaatttattgctgggcacagcacctaggtgatgtgactgtcctctcctttctgggctctgcatatattctgtattgcaaaatatgcagcacctatgtggtgtgactcttctctcatgtttgaactcttttcactggagtgattgtgacatatacgtcagcccacctattaggttatgcaacttccctcttcattctgatctttacccacacagaaaattgtgacatatttctaggcctctcacctagatgatgttatcgttttacatgggccctcctctcaggggtcaggtattgctggacctaaagcaggtggtgtaactctctttgactgcttagcctttgttcaaggaaaaattgtaatgtttcaatggattcaagacctaaatggtgtgactatcatctcttgcctgaggtattgtgacatatggctgggtccaacacctaggtgatgtgactctcttgcatgggccctgccaacagaaggcattatgacatatctctgggcacaccaattatttgatgtgactctgctgttttacctggactctgcccatagaagagatagtgacgtatctctgggccaagcagctaggtgttgtgactcttctcttttgcttgtgtcaggcccacagaagggataatgaattaccactaggcccagcacacaagcaatgtcattcctctgcctggttattgtccacaagggccactgcaacatatctttgggcccatgacctgacctaggtgatgtgattctcgttttctttcttggacctgtccacagtggaaattgtgacatattgcctggtgcagcacctacataatattactctccacttttgtctgagccctgcccatgggtgtgattgtggcagataagtgagcactgactctatgttatatgaggcctctctttttttctagccctacctaccagagacattgctacatatttcttgtcccctcaccaaggtcatgtgacacttctgtctaggcctttctctcaggaagtattgtaggaaatttttgtacccagaacctaagtaatgtgactcttctctacttcttgggctctgctcaaggaggcattgtgtgtatccctggatgcagcacctaggggatgttactctcctctcctgcctttgcccaacatacattgtgtattgtaataaatggctggactcaacaagtaggtgatgcgactcttctgcatgagccctgaagacaggggtattatatgatacaatttattcatcacctaggagatgtgacacatttttgttgcctgggacctgccaaataagaagattgtgacatatcacttgacccagcatctaggtgaggtgattttttttttttttttgcctggtccccacatgttttgggttttgtgacatattgctgggcccaatacctagaaaatggaaggctccgcctggggcctgtccacagtggatctggtgacatatctctgcattaatcacctaagagatgtggctgtcttcttctccctgaaccctgcttacagggaagattgtgacatattgctggcatcagcaaacagacgatgtgtctctcgtaattgggccttgcccacagaaagcattttgacatattgctgggcttattactgaggtgaggtgactctgcagcctgcaccctgcaggggttgtaacgtattcctggctgagtacccaggtgatgtgactcttctgcctggtcccttgtgtcagggaagattgtgacatattcctggcccagaatacaggtgatgtgactctcctgtttgctccctacccacaggtaagactgtgacatatatcttggtccaactaacagttgcaataacgactctcatgccacacatcagccaatagaaaggatactgtcagttttagctgggattagagaaaagggtaagatcccatgtctcctctttgtatgaaggttatagaaaattaccactttctcatacatggtgtaaatccctagtgtggaacagaatgccatcacagagcccagcatccaaatgagattgggtttctcatattcttacactaccatccattgggattttcacccttacacgtggacagagcccacaggtgaggtcctgaatctcacaggtcgacacagaccacagctggaattgtttccgtcaacacagaccacagctggaattgtttccgtcatatgctacagttgggatggtgactcatttcttttcttttcttttttttttttgaggcggagtctcgctctgtcgcccaggctggagtgcagtggcgcgatcttggctcactgcaagctccgcctcccgggttcatgccattctcctgcctcagcctcccatgtagctgggactacaggcacccgccaccatgcctggctaactattttttgtatttttagtagagacggggtttcaccgtcttagctaggatggtctcgatctcctgacctcatgatctgcccgcctcggcctcccaaagtgctgagattacaggtgtgagccaccgcgcccggccaggtgactcatttctaaacctagttcataggtaggtgaggatgctcctatttggacctagccaattggagagaagttgacccagacaagagcttagggtaaaaattataaacatgggtccacaccagcagggagatctcagagcatattgagactctcatgcataaagccctctggtgctacaatgagtttcctgacaaggcacagcacaggtgagattttgactcttgtatgcacatccagttgacaataaagattgtcatactgccacgtgaacacggccaacttttgaggttctgaacgtcacatttggaggcagtcgaaacttgaaaaagtgactcttatatgtggatccagtccacaggtaggctggtgactctccgtccaagattcagcacacctgtgaggctgtgactctactaaggaggcatagtgcacagaagaaagcgaggttcccacgcacagacctagtccaccattaagattgtgactcatgtatttagacccaacatagaggagatgttgactcccatacttagaattgggtcatgtgcaagaattttaattttatccctatatctttctgcatgtgagattgtgtgacatacacctctgtccagcaactaagtgatttgacccttctgcctgagcccatcccacagatggaattttgacatcttgctaaacccagtaccttcatgatgggactctagtccactgccttggcaccgcccacagacagcactgtgacatatcactgtcactaggccttatattcagttaatatgagtctacccttctgttttgtcactgtgcacagaaggcattgtgacacccaagttatgtgattctcctgtctgtaccctgcccacatggcccattgtgatatattactgggtccaaaactcagatgatataactctcctgcctggtccctgcctacaggaggcattgtgacatctctgcatccattacctaggtgatgtgactcacttctgcctgatctctgctcacaggggatattgtgactcatcactgggcccagcattgagttgatgtgactcttctattctttttaggttctgcctgcaggaaaggttgtgatgtgtctctggacccaacggtaaggtgatgttacacttttgccttggttctgacctcagaaagctttctgacatattgctgggctcagcaccaagatgatgtgagtctcttgcctggaccctgcccacagggggcattgtgacatatctctaagttcatgaactatttgatgtgactcttcttgcttacttggtctttgccattagaagagattatcacgtctctgattccagtacctaggtgttgtgactctccttgtttgcctgcgctatgcccacagaaggtagagtgaattatccctaagcccaacacacaggtgatgtgattctactgcctggtcattgcccacaggggtcactgcaatgtatctctgggcccattacctagatggtgtaattctccttatttttctgcttctgtccccagtagggatggtgacatattccttcacccaacatttatgtgatgtgattctcctctcatgtctggactctgatcactgttgtaattttgacatagggctgggctcatctgtctaggttatgtgacaggttatgtgactctcttctttcttcctaagccctacctacagggagcatgggtacatagctctgggcccctcacctaaatgatgcaatcctcattcttgggcccttcactcagtgagtactgtgacatattgatggactcagcacctaggtgaggtaactctcttctacttcttgggctctgaccaaggaggtattgtgacgtatcgctgagcccagcacataggtaatgttactcttttctcctgcctgagctcagcataaattgtgtattgtgacatatggcctatcttaacaactatgtggtgcaactcttctgcatgagccctgcccataggggtattatgccatacctttttgtttatcacctgggtgatgtgacacatttatttttctgcctgggctctgctaaagagggttattataacatatcttttggcccagcacctatgtgatgtgactgtcctttctcccaggccccaaatatttggtgtattgtgaaataacactgggtccaacacctagaaaataagaggctcctgcctgggccctgcccagtgggccttgtgacatatatctgcatacactacctaggacatgtgactcttcttttctgcctgcaccctcctaacagaaaagattatgacacatcactggaccccgcgacaaggtggtgaggctcttttgactgagtcttgaatacgtagatcattgtgacatattgctgagccctcacagaagattgtgacatatatctggccccaaaccaaggtaatgttactctcctgcttactcccaatccatgagtgattgtgacatatatcttggcccagctcacaggtgatgatgactctcataccttgaactagccaatgagagagatactgtctcttatagcaaggctcagggaaaaaggtaagatcctgggtgtcctctttgtacaaaggtcacagaggtttaccactctcttgcatgttgtataaagcccacaagtggtacagagagtgtcatcacaggtccaaggacacaagaaatactgtatttctggtatgcacaccctgccaatccttaaaatagtcatcctcacacatggacacaacccactggtgagatcctgaatctcacacgtagacacagtctacagatggaattgtgtcagtcatatgtgaacatctggacacttatgggatagtgacccatttctaaacccagctcataggcacatgagtactcttctatttagacacagccaattggggaggtgttgactctcatacctgagcttagactgacacgtacaatcatgggctcatatcagcatgaaggtcttaatgcagattgcaattctcatgcatatcatattgtattagttcattttcacactgctataaagaactgcccaagaccaggtaatttaggtagaaaagggatttaattgactcacagttccacatagctggggagacctcaggaaatttataatcatggcagaaggagaatcaggaaccttcttcacaaggtggcaggagggagaaagtgaataaagaaggaacttccaacacttataaaaccatcagatctctgagaactcactcactatcacaaaaacagtatgggggaaactgtcccatgatccaatgacctgcctgctttgacacatggagattacaattgtagatgagatttgggtgaggacatagagccaaaccatgtatctcataaattctttgggtggtacagagagtgtactaacagagcccagctcaaaggtgagattgtaatactagtaagcagacacagtcaagagtaaagattgttgtcctctcacatgagcatggcccactgttgaggatttgaatcttatatctagaggcagtcaaaagttgcaatgttgactctcatacatggatttttgttatgcatggatttgttgaccttcaaaccataatttagcacacgtgtcaggctgcgacttatctaaggggacacaatgcccagaaaacattgagaagctgctgcacagatccagttcacagttgagattgtgactcatgtacttcacacaacatacaagacatgttgactctcatacctagaaccagaacatgtgagggattgataatctcatctgtggattttttgaaggtgtgattgtgacatacgcctcagccaaacacctgatttgactctcctgcctgggcttcgttcacaagtagaatggtgatatactgctggacccagaacctaggcgagatgactctattctcaagccttggtgcctcttacaggaggcattgtggcatatcgctgggacttgcactcaggtgacgtaagttttctctcctaccttggtgctgcacagaagggacattgtgacacatcactcattctaacacttaggcgatgtgactcttctgcctgggcccagcctaaaaaggggattgtgatatctccctgcactcctcacccaggtaatgtactctcatctcttgcttggagggatggtgacatatccctgggctcagcacctagctcatgtgacacttctcttcttcctaggttctgcccacaggggagattgttacatatatcctgggcccagctccaagatgttactcatttgccttggccctgtcttcagaaggtattgtgacctattgctgggcccaggaccaaggtgatgtgactttcttgccttgactctgtcaaaaagggggcatctgtgggtccataaatatttgatgtatctttcttttcttaccagggtcttgcttatagaagagattgttacatatctctgttcccagcatctaagtgatgtaactctcctcacccgcctgggccacgtccatagatgaaatagtggcttatccctgggcccagaacacaggcaatctgatttatttctcctcatctctttctacagggggcattgagaagtatctcttagcccatcaactatttgatgtgtatctcttctcttacctgggctttgcccataggggatgttgtaacatatggcccagcatgtaggagatgacactctcctctgattgttacatattgctttgctcaccacctacttgatgtgactctcctctcatgcatcgtccctgccccttgggggtgattgtgacatatagctggctgtagcccctaggttacgtaactttcctcttcttcctgagccctacccacagaaggcattgtgccatatctctggggctctcaaacctaggtgatgtggcgctcctgctttggtcttcctctcagaaagtattgtgatgtattgctggacctagaacctaggtgatatggctctcctctactgtttggtctctgaccaaaaagggattgtgatgtatcactaggcccagcacctaactgttgtggctctctactttctcctaggcactgcatacattgcctatggtgacatatgtctggatccaaaaccaaaacaatgcaactgttttgcattggcaacgtccacaggtgtattaccacatatcttttcctttagctctgaaattgagctctgaaataatctggattttttatctgtgtgtctctcctgttgagtttgaactttaatccaaaagccatgaaaagagtcataattactgtcacaaagtgataacttttttctcctcctcctcctttttcctcctttccatctcctccattccttttcgtcttctcctcctcacttttctcctcctctcctcatctcttcttcctccccattcatgttctcctgctcctttttctttctcccctcttcttcctcacctcctcctccatttctcccccacctcctcctccacttctcccccacctcctcctccacttctcccccacctcctcctccacttctcccccacctcctcctccacttctcccctttcttcctcctcctctccttttcttcctctcatctttcttcccttcctcctcctctcctttttactcccctccaccacctctcctcttccatctctcctcctccttttcctctttttctcctcgtcctttctcctttttgtttcctcctcctttcctcatcctcccgtttttttcttttcttcctcctcccctccccttgtctccttttcctctcctccttttcagttcttcctccttttccttcgcctctcctcctctccacctttttctcttcctccttctcctatccacattctcctcttcctcttacttttcctttctctccttcttctcctctcctttctcctctcctcctgttccttttcttctttcttctctcctcctcccctccttctcttcctcatcttccttttctccatcttctcctcgtcctcctcctcctctccccctcctttcctcctcttcccttcctcttcctcctactctcttccccctccttttctttgttcctactttcctccttctccccattcttttccttttttctcctctacttctctgtcctcttctcctccgtcttcttcctatcatcctccttttcctttcttctcctctactcttctcctccttttcctttttctctcctcttcctttttccttttcctcttctcttcctcccatcctccttttccttcttttcctcctccttttctcttctcctttctcctcctccttctcttctcctctcctcctcctttcctcttctctcctcctcctctacttctccttctttatcctctcctccttcttttcttctacgccttctcctcattctcctctcctctttttctcattcttttcgtctcctccttctctttcttcttcctccttctcctctttttctactcctcctacttttcctttttcttttctcccatccttttcctcctcctattcttctcctcttcgtttcctattttttctcctcctctcctctttctccactcctttcttttctcctcctccttctcttctcctttcctcctcctctccttcacctcttcatctcctcctccttcttctgctcccgattctcctcctctcctttctcttcgtcttctcctcttccttgtcccctcctcctccttgtccatctcctctactcctccttctcctcctcctccttctcttcctttcctcctttcctctttttctcatcctctcctcctcctctcgtcctcttctcttttcctcattcttttcttcttctcctccttttttctccctacttcctcctagcttcccttttctcctctcctctcctggtcctgttgtccccctctcctttttttctccacttcctctcttcttactatcttcttctcattttctcttctagttcttctctttcctcctccttttcttctcttctcctcctcctctttcttcactcctccactcctactccttctcttactgtgccactggccatgccaaacagcacccagcacaagtagtggcaccctcttcagcgctgcgctagaaagaactgatgtgcatttatattagcttttggaggatagtactaatccggcctaactcaggcggccaagtatatatatatatatacgtatatacatatgtatgtatatacgtatgtatacatatatatatacacatatatatttatagatatattctatgagaaataatcttgctctgtcacctaggctgcagtgcagtggcacaagattatgactcactgtagcctcaagagatcctctcacctcaccctcccgagtagctgggactacaggcgtggcccatcacacctgactaaattcttttttagtgacggggtctcaacacgttgcctagtctggtctgaaacttctgggcgcaagctctctaatgtttttgcattcatagtctcccttattttaatttctcaagtttttgcaaaattgttacataactatccgcccttttcatagagcgctgtttcttgagccaggtcttctgtccatgcatgtcctcttgagagagtggatgtcagccagctaccctggctgagagggatggggataatacagggatgcaataaaggagacagtgataatttatatgatctgggaccccaggcctcacaccagaactgtctagtatacttttagcaaacaagtgccactgatctgagccttgttctgcccttccactttccactttattacacaagcaggagataggcaagggagaaggcaggatgatgaggagactaaattccagaaaagaaagggctgcgtgcagtaagcagacagttgcccccaaagtggtctgggctcccacttaccttagagacatgtgcaacacttgtgaatagttgttttacaattcttaaatcagtggacagactgtaagcatcccattggtgtcagttgccaggtgcccaatgcctgttctctgcagcaacctttgtggtcccatacctgggcgtgagttctgttcctgcagagtgccctgtgcattctggtgcttttgtgccctctcctctaacctataaactgacaactctaactctatattttcacttacaatttttctgaagcagtgatcttttgtcatcttgatcacactacaagtcgctcaccctgcaagtacttgtaaaaatgaaagtaatctccattccttctggaaggtgattgccatgtacacaacctactaggccaggaacattactgatggctgtcctgatgcatgtctctctcacccccatgtccaatcagtcaccaggctctccccaaaaccatgctccggtcactgactttggctgtttaatcacttctgacctaaggtcctcattgagtcataagtacctcttgagttaattttctgcctccagtttctctctactgctgtttatcttccaccctgctgccagagtcatcatcctcaaaaatgaaagctgctctcattgtttgcctgcctaataacatctcttccctccctgttgtctacaaaaagaaaaatccaaactccttcacttgttttacaaagaccctcatctgcttccaaaccaaattgctagtcttggctcttgtctctgtcttccacatcactgccacactgaataattctttactgcctctgttgttgcacgggttgttctttttgttttgtctccatccccttcccccagcaaagaatatttactctttactcttctgttgagacccatctcaaatactaccttttctagggaaaattaggccttctgttcctaataacttttacccccatctatcaagtctgtctgctgtaatttatctgttaacatgtttctcccacctcaagaatattttttccatcttctgtacctagcacaattgcatggttggtgctcactgactactacatgttgatttatttattttacttgtttgagaggtggagtcttgctctgttatccaggctggtgtgcagtgatacaatcttggctcactgcaggctctgcctcccggtttcaagcaattctcctgcctcagcctcccaagtagctccgattacaggcacccaccaccacgtccagctaatttttgtattttcagtagagacaggtttcaccacattggtcaggctggttttgaactcctgacctcaggtgagccgcctgccttggcctggcaaaatgctgggattacaggcataagacaccatgcctggacttgcatgctgatttccgatataaaaatgaaatttttgaagattttggagaataccatcatgtaaattggaagctaaggcctaactattactacacattcagcaaaggaagtgggtataaactaacaactttggcacatctgtcatgcagtagtttgctgcaaggtggaaaagattttggtgctttggtgggaaatactgttgaattacagaaattctaaaacaaaagctggctcagcttaaagagaaaagaaaatgcttgctaatgcctgcttgcactaaaagctgtcacactgtggcctttaataattctaaacatttttaatggattttggtttgaacttcaaattcaataggaaaaataaatgcacagataaaggacccagatcatttcagagctccaatgtgtgaacccgttttctctacttatttagagttttgtttcactagtggcatgagttaataggagtgttgctttgtacataaattctctttattccataattcttggttttaaaaattgaatgcaataccagaaacctacagggtataaatcttgcttgatgtgtgtgcaatgtacatacttgataataattgattatatatcatatttataaaaagaatcatgtgtactgttttaggagaacatactttaccctgatactttattgttaaaaacaacaaagcattgttctaactactaaaaatcaaaaatttaactttcttttaaaagaggtacatgtatcttcagaaataaaagggatacccagaagataaggtaggtgttctgaaacacgaggtgaaacatttgaatgggttttttttgtcaaacaataaatttttaacaaagaaaaagtttgcattatgggtgaagtatccttagtatctttatacaagatgaaatcctgattgattaaagatacgttactaactttaaatgtcttttaataagtgcttacatgctaactagtatttagactcatacctggcagatacatttagacataagattctaacttagtttcatttctgaggaggcttgtgtattttcctctgtgatacagaaaatagatttttttaagccattttatcttttactttagagttttaattgtttgttaagtggtttataatggtttaattaacaacccgaacaggttttctgtgatttggttggttaaatctatatgtatttggttaaaatattctacgtcaaagttttaaaccaagagtaacttaaaggagtcttaacttgtgtttctctgaatttgatttgtgtttaaattatgaaattaagttttcaaagaacgatttttgtgttcaaaagcttaaggtttcacaacttaattttcctaagtacaatttttttctatcggacttagcctccttttagaagacagttttttactaccaaatttaccattcccatttttttttttacttttacagatctgtatttagtccataaatatccaaatatctgcttgtgaaggttctgtctttaccaccaagcctaccggtatggcaaagacatacagttgctaatctcattaaagatagatcacaatgagagagactcatctagccatgaacaggtcacttctatcagtgttaactgctcaaagttaagtatgacaagaagctatgaagtaaagtttggcctttgtgtatgggagaggaatggaggatgccaggatgcaggtcaaggaaggcatcctgtggaagtaacatttgagctaatatctgaaggatgtgtgatagaaggaaaaagaatgcttcagagaacagctggtacaaaagccctgaggttgaaaaggtggatgtgtcagggaaatgggggaagtacagtgtctggaagaagaaaagacactgaatgaggtgaatgacaggaatgatgaagtagataggggctagagcagattgtaagaactctggaaagctttgaaaactgttgggccaaaaagtagtatgatgaaatttgcatgctaaggactatttttacccaagtagtaaatagaccaggtagaaggaaataatgattggccttctgtttggaagatcagttagaaggctagtttatgaaaactttgaaaagcagtgatggcctgcagcatcgtgacagtaaagatgggagctcaaatggatttgataaaggtttaagaggtaagagaggcttgctgattggatggtgtggggaagggatagataacttcctgatcttggattttatagctgggtggatggtggtgcctcattgagactggaatgctggattaagcaatgtatatgaacagggcatgttccctaccctttaaagagttatgtatatgttttccatgtttttagctatttctccacttgtaatgtgttttagttggttaaaaattatgtacctggcatggatgacgcattaaatgtacttatgtaactgataaaccaatgttacattcttgaaaataaattacattctatgaaaataaatggctttctcctattcttttccttctttcaattttttgatactaaaatgcaaagaaaagatttcttgtagatgacctgagcttttgaatgattttcagatgagatgtacacctaaatgttaagagtgttgaagtttgtatttgatttagtgatgctttatctgtttgacttggaagcataggattcatgagaagagacttcgggtaggaagcaagctaggactctcaggatggcttaagcccatcagagcagttctgatgctaattaggagcatcagaactcctttcaaggcctgatttttcaagtcatttcttaattgaaagcccatgaagaacataagtggtcttgtgatatgcttaatgtcttagagatgtatcaatattttgcttcagcagtaatctgtgaaaataaagtttatgtagtaaacggaagttgctgtttatctactggatgctaagatcttcactagctctgtcagtgccaaagaaaatgattcattttacccctttcacaaagagtgaaacttatttccacagagtatttgtctagccagcatttaaatacttctggtgatgacagactttctacctacccctaagcagtccttgagattgtactatattttttaatggcaaacaaagtactgtgtattttaatggcaaacaaaatagtgatgttgtctgctgagttggtacatgctagaagctggagtgcaggcaggctgtcctgtgctttatgcaactcagggagacagcatgcaatctgacccccagagagttccatcaaggcatgcctcaactactcagcgagtgaccatcttctaccttaagatttctgctcctgagaaaaaatatctgtctcacttggctgcacagccatcctcttccgtgtgaattaggccaccatcttctaagaccatctcacataaaagttttactgggactcgcggccaggcatggtggctcatgcctgtaatcccagcacttctggaggctgaggcggatcacctgatgtcaggagttcgagaccagctttgtcaacatggtgaaagctcgcctctactaaatatataaaaatcagccgggtgttggggcgggcgcctgtaatcccagctactcgggaggccgaggtgggagaatcactggaacctgggaggtggaggttgcagtgagccgagattgtgccactgcactccagccttggcagcagagccagacttcgtctcaaaagaaaaaaaaaaaaagaaagaaagtcttctaataccatctcacatgaaagtcttattgggatgctcattttgggtaatgcttgtctctgatgtcatccacatgactcaccagaatcggaggtgagccccactgtgctccaaagatggtcctctgttatggtattaatcctgacagatgtaacctgaacatccctttgggcccctggtagcactgattttcccattttggggagaatatgatttttcatctcttgcttgagcccatggataattctgcatcaccacaccataaatatcattaggatggacaccatgctttattccatttctatatgggataagagaaactgaatataaaggaataatactttaaaaagccctccctactcctcactttaaaaaattgaaatagcttggtgaagggatgctgggaagaatacttctaaagctaagcttaaatatggtttttgaaaagttaaatcttaaggtactctacaaataactcagagtttttgcctcactgtgacccaagcgtatgcatgcatttagaagtctaattacaagttagtcataaatatatcttaccagataattaccatgttgtgaatatccaaaattggaatcaatagtatgttcagaaacaatttgtggtgacaagtatatataaggcaacttttagataagccactcatagctacttattttggagagtgctggataatggtgaccatacatgctgtctgttgggtgatgtaagttttcctaaatatttgtgtatttgcactgttatagtgctgcttcctcaaggccctggtgtgttacattttctatgctttggggtatgggcatgtcttacatatggctgtcttctgtatatgttagaccttctattgtggtaagactaagtgaatgaaagttgaatatattttctgtgaagtccctgaggaaattaattaagttaataaagaaatacaagtttgaaatttgagtttacttcagagaagtaatttgagtttacttcagagaaattaaaaattatatctggtaatacaggccatgcgatgtgtcttagggttgtctgtaatatgcctattctttgcatgcccaaagccagtgtcatgttgctaagaatgtgagatcaggatatatgctgtaaaattactctttcttcaggaaagcggatgctgtgcctcagaatgagagtgtgtgtgtatgtttggtcttcttgtgacagtaagtgctgaaaacagggtagtcactcatcttctccgtttctcatggatttggctttttttaagcagctctagatgtagatgtggtgaacatggtggtctgtgtgttctgaagcttgctgtgcgcctttgttactctgttctgcactggagagtggatagtgtgtggtcatgtgtttgttttgtgttatgctaagagaaagggagaagtatcagtgtattggagaagtggagtggttaacactggtcaaattcttatgtttagagattattatttatttcattattatctttacagtaaatggagttttgtaagggctcatttgcccagcttgtctctaagaagtctgatagtagctagggctgtctctggtgtctcttcagaaaattaaataaacagaaatccagtcctaaccagaaactatgacatgcttctattacaaacaaatctgtctagagtacttttaaataagtttaacctacaatattcaagttgcagacaaactttggtgaaaaccatttcttagccaggtttgtttgtatttgcattaaatcatataaaccagaagttaaatctttctgtttctcttctacctgtgctagacctattattaatcgataggaatccagtctgtaagtcaataatcaaaagttgaactttaattttcaccctttgttggttgttagcttttttacatagaaacacactcaccatgatggcagtaagagcagaagtcataagatctaacaattactgaccactagctaccagcatcctaattttttttttaacacatcatctttttcattcattacatgacagagggatgtagatgtaattattatcctcaggattcacgtgagaaaacagagacccagggaggcagccagctattagaactcaaactgttaagtttgtctccagggctgtgcttctgacccctgccggactacctaccatagagacacgattcgttcaccaaacaaatactaactgaaaatctcctgtgtgcagagttctccctgttaggcacatcaagcgaaaagatgggcaccccaaggaaaaagtataagtgtgccaggacagggtcctgatttccagaaataaatcacagcttacctagtcaacacctcattttacctaatatttgacgacataagtgggaccttcccttctgtgatgatcaggaatggagattggtattctgtggactgaggggcttgcataggtcgtgttactacatgaactgactgacttggatttgtgtgcccttaaagaggggaggttcaacaagacactaaagcagaatactagcaggctgagacccagtgggaaagaagagtgaaaccctgaacaaagcctgtcaaggatcaaatttttaccatgttctcattgcaaaggataatgtgtgaaaaagaggtggtctttcacatggtgggaaatattccagaagtgaaaaagggtgggcatggactctgcgattctgctggtcctctgtgtggtggatcatgggggactctcttatcttttgaaaccttttttgtggacacccacttttaacctcactggaagtgctgagccctattcaaggacccatatgaaacctccttttgaagagatttcaaactgtacactcataagtgtttgggaaatttagttttgctttgggtaggcccaacgccttgagaacaggtctattggtttgttataataggttattgttactttacatattatagaaactcaaggttttgcctcagaatttgcattggggtgatcctaaaaagttcataacgtgatatgagccaagtaaaggcaacaattgaattggcttgactactcatctaatctaaagatttgtccaagctcaactgtgatagcctctgggaggtattatttctttgttgttttgctttttaagcaggaggagccacatgtactggaggacagtgagaggaagaccttctgtgttttgagtatgtttgagatggggtcaccagtgtgcctagattcttttatgagggtgcctgaacaagttatgaaattgggaaatcttgcattgtgataagcacttgagggtctgtttcctgtttcttcctatctgtggataaggactattttgaaactaggaataaatagagaaatgaagtcatgcatgctaccagctcaattttaactgacttgtcttctctatttactgctagtattattattatcattgttatatttctcatgacattgggagagtttcagcaaagcaatagtggaaagcaatgtggattagcagaccagcattctggctcctttcttttgtcatctgttgaatatcactttcagcaagcttggattgggaaccattttttgatgcccacacctggtaccaggctgcggaactataaagattgatataatatggttctagttctaaaattcaccagtgactcacaaacagcaagaacaagtggagaactggcaagtgaaaagttgcagtgcaaagaaaaggtgataccctcaaatgtacatgttttccatgtgtagaggaagagtgtgggaaagaagaaatgtaaatttaggcaaaaaagtagtttaagtacaggacttgaagtattaaaatataaggcttatttgaggacagggtaggacaagaagtagagtgtgacaagagaatatagtttggaagtgttgtgtagagttggcatgatgagagatactggccttaggaaaatggatgaggggctcagctgtgtaggctgttatgagccatcaaatgttttggagcagggctgtaatgtgagcagctctgtgtttcagagggaacactgctaacgttttagaaagtttaagcttgaaaaaagacaatgtgttcagcaacgtgcagtgcaaacttgtaatttggtaccctttttgatagaatacattttccctttttaaaaagagacttttcagcccagaatgtattggctgccttcctatacatggttaaataataatagaaggtgagaaacatttattttccacaaatcaaattcaattagacaatgtttaaacttccctaattgtatttactaattggtacttatttaaactccttagagagtagacaattttagaagggacggacttcttttctctcaaaaacattgaatatgaacactaggagctgaatggagatatatgtaaaataattttgaacaaatgattattataatggggttaccaaaagcttatacaaatcagtaaaaagttaaataattcagtagcaaaataagcagaagaccttactaggtaattcaaaagtagtacactaaacatatataaaaccaagttacctaaatagttactaaaatgcatattaaaataatgagacgccagtttttcacataccaaaaaagaatttttttaactggaattttttaaactttttatttattattctttaagttctagggtacatgtgcatagcgtggaggtttgttatagtcaggaacctcaggcttcaggtctgttggagtttgctggaggtccactccagactctgtttgcctgggtaccagtagaggctgcagagcaacagatattgcagaacagcaaatgttgctgcctgatccttcctctggaagcttcgtctcagaggggcacccggctgtatgagatgtcagttggcccctacagggagttgtctcccagttaggctactcgggggtcagggagccacttgaagaggcagtctgtctattctcagatctcaaactctgtgctgggagaaccactactctcttcaaagctgtcagacagggatgtttaagtctgcagaagtttctgctaccttttcttcagctatgccctgcccccagaggcacagtctacagaggcaggcaggcctccttgagctgcagtgggctccaaccaattcaaacttcccggctgctttgtttacctagtcaagcctcagcgatggtggacgcccctcccccaacctcgctgccaccttgcagtttgatctcggactgctgtgctagcagtgagcaaggctccatgggcatgggaccctccgtgccaggcacaggatataatctcctggtgtgccgtttgctaagaccgttggaaaagtgtagcattagggtgggagtgtcccaattttccaagtaccatctgtcacggcttcccttgcctaggaaagggaattccccgaccccttgcgctttctgggtgaggtgatgccctaccctgcttcagctcacactccatgggctgcacccactgtctaacaagtcacagtgagatgaacccagtacctcagttggaaatgcagaaatcacctgtcttctgcgtcactcatgctgggagccgtagactggagctgttcctattcggccatcttggaaccccggaaaatactttttaaaataacatgttccattaaactcttcataaatgataattgtagggaaacaagagctttctaacactgttaccggaagtacaatttgatgtcatatttgtatatggcaggttttacactgtgcatcagcagcctttaaaatgtgctacatttcttaatatagtaattttaactaatatattaattttaacataatgaagtggaatcacttgtttggggtgaatgcctgaggttcatcatctcataccaaggaaatcgagtacatggacacagaaaaacttggtttaggagcagaggtttaataggcaaaagaaagagaaaggagaatagctctctctcctgagaaagagtgggacttttagcttgcagagaagtgcactggattttacagactgccttcaggaggcagtgtctgatttacataggggccaaagattggctggatcaggtatggatgtttacacagcttaggaggaagctagctaatcttcaattatgcaaatggagcacttgccagcaccatgttgcctgttcgttactctacacgtggtttacaaagaaaagggaagatggagccaccattttgaacatgtgtcctttccaggtagctccttttcctattagcagagctgcaggcatttattcatgcaagcttccagctcgcttatctatgtctgcagctcaatcttacaggctgctctttgttaaaaagaaataatttgggggtttttattaaaaggaaaactttaccaaggactgtttttgccctcactcactatctgcctaaattatttatttatttattcatttttgtttttgttgagatggattctcgctgtcgcccaggctggagtgcagtggcgtgatctccgcccactgcaggctccgccccccaggttcatgccgttctcctgcttttaactcctgtatcaataatagttaatgtcatgggaaacatttataacgtatttgtatgtatgaataagcaagatagcaagttttaactagtggttgtgtttaatttatttatacaaatgtgttgggtgcaagtataatttagttacatgcatagattgcatagtggtgaagtcagggcttttatggtatccatcactcgaataatgtacattataactattaagtaatttctcaccatctaccccaccctaccttcttactctttcatgtcaggtgtgctggccctcaatgaccaacacaacaaagataaatttattgttttctgagacttagacttagacttagaattcaaaatcaacctaagagaaaagatgaccccgagccaataaaacatttgttttatatatatatgtatttataaacacacacatacacagacatgtatatatatgtgtgtgtgtatgtgtgtgtgtatatatatatatttgtttatactgaagaaactcatacagagtctttcccactgcacaaacccaaaagtaaagccacatggccctatgcaataaacattatggtaataacttcaaaaaaaaaaaaaaacttcctccaatgaatgtaaattcgaaaataaaatgaaacaactatttctccagatgtgcagaaatcaatataaagacacataaagacacaggaaacacagaaaagcaaggcttatgacactttcaaaggaacacaataattctccagtactctaagaaaaaaaaattcattgaaatggctttaaaatactttaaaaagacttcaaaatatagattttaaagaaactcaaagagaggcaagagaaatctgaaaaccagtacaaaaataaataaataaatttagagtccaaatgggaaatgttccaaggagatagatatcttttaatagaaactgaaacaaaaattatggaactgaagatttattgcaggcaaaagaaaatacattcaaagattcaataatagactggaagaaacataaaaataattttcaaacctttaaacaggtcttttaaaataatacactcagacaaaaataaggagaaaagaataaaaaagaatgaagactttgtttccaactacatgaagtaactaaactttaaaattatcagtgtttctgaggaagaaaaaacatcaaaaagtttagaaaacctatttaagaaaacaattgatgaaaactttccaactctagcaatagaattagacatacatacacaggaagctcagcaaacaaaatacaacaaaatataaacaaaatatattgcaaaacagacatcataatggcacatgataatcagaatatctaaagtcaaagtgaaggaagtaattctaaaataagcaaaagaaaagcatctagtaatttataaagaaaaccacattagattaaaagcagacttctcagcagaaactttactgaccagaagagaatgggatggcacttttagagtgttgaaaaaaaagaaaactgccagccaaaaattttatatcaagctagaataaccttcacaaatgaagaatataaagtcttaccctgacaaataaatgctggggaaactaattaccactagactgggcctatgaaagatgttaaaaaaaattctaatataaaaacaagagattgatattcaccattattaaaatatataaaagtataaaactaacaggtcttacaaaacaaaacaaagtgaaataaatcaaatcacaacatgacagaattttattaaactacaaagacagataaaaaaataagacaagaaaataattaacattatgatagtaacaaaaccttacatattaatatttaccttgaatataaataaattaaatccttcattgaaatgtatagatttggttgggtgcggtggctcacgcctgtagtcccagcactttgggagggtgaggtgagggtatcacgaggtcaagagatcaagaccagcctggtgaatatgatgaaaccccgtctcttctgaaaatacaaaaattagctgagcgtggtggtgtgtgcctgtagtcccagctactcaggaggctgagacaggagaatcacttcaataggggaggcagaggttgcagtgagcagtgggacgagatcgcgccactgcactccagcctggcgatggagcaagactccgtctcaaaaaaaaaaaaaaagtatagatttatgaaatgaatgagaaaaaataacgcaaatctatgttgcctacaaaaatctcaccttacttgtaagacacatatagattaaaggcaaatgggggggaatatattaacacaaacagaaaccaaaagtaaataggagtatctatacttacatcaaataaaacagactttaaattaaaaagctgtaacaaaaaaggataaagatcatcatccaataataaagaaatcatttcagccaaaagatataacaattctaaatatatatgaacccaacatcacagcaccctgatttacaaagaaatattattaaatctatagaacgagatagacagtaatacaataatagtggagaaattcaacattctactcacagcattagagagaccattgagataggaaatctggcaaatcaacaaagtatccccccaaatcaaaattatacgaactacctacttagaccacagtagaataaaactacaaatcagtatcaagagaaatttcagaaactataaatttacaaagaatttaaataacatactcctcaacagtgactatgtaaatgaagtaattatgatggttgaccaggggtggtggctcccacctgtaatcccagcactttgggaggctgagacaggtggaccacctgaggtaagaagtttaacactagcctgggcaacatggcaaaaccctgtccctacaaaaaaaaatatgaaaaaatagctaggtgtggtggtgtgcacctatggtcctagctactcgggaggctaatataaaacgatcgtttgagcctggaaggcagaagttgcagtgagccaacactgtgccactacactccagcctgggtgacagtgtaaaacctatctcaaaaaaaaaaaaaaaaaattaagatgaaaattaaaaatttgtgggaaaaaagatggaaatagaaacacaatataataaaacctgtgagatacatcaaatgtagtactaaaagggaagttaatagcctaaaggcctgcatcaaaaaaatagaaagcttacatattaaggacctgacatcacatttcaaagaactagaaaattaataacaaatcaaatcccaagttagaagaggaaataaataaaaatcagaacacaaccaaatgacatgaagtccaaaaacaataaaaatgaccaacagaataaagagttggtttttcaaaaagacaaaattggtaaattgctagctagattaaccacaaatagaatagaaatctaaataaacaaatcagatataaaagaacagacattacaatggatacaacagtaatacagaagatcactagaaacgattataaacaactagacactcacaaacctgaaaacctagaaagaatgaataaatccatggaaacaaacaacctcccaagatagagtcgggaagaaatagagtacctgaacaaaccaatactgagtagcatgattgagtcagcaataaaaaaaaatgtcttgacaaagaaaagctcaggactaaatgcacagcaaaattctaccaagtgtacaaacaataataatcctcctgaaactcttaccaaaaattgaggataataaaactcttcctaagtcactcagaggtcagtatcaccctgataccaaaactagccaaggacacaacaaagaaaactattattaaattattatttattatattattattataaaaaatagacaaatggaaatcaaactaaaagttttggcacagaaaaaaaaatcagcagggtaaatatgcaagctacagaataaaagaaaatatttgcaaactacgtgccaacatggaactaatattcagtacttacaaataactcaaacaactcaaaaatataataatagtaataataaagaattctattgacaattgagcaaataacattactaatcatttttcaataaagacatacaaatagccaacacgcatatgaaaaaaatgctcaatctcaactaaaaataaaactgccatttttttttttttttttgagacggagtcttagttgtccaggctggagtgcagtggtacgatctcagctcactgcaaccactgactcccaggttcaagcaattcttctgtgtcagcctcctgaggagttggggctgcaggcaagtgccaccacgcctggctaacttttgtatttttagtagagacggggtttcaccatatcgctcaggctggtctcaaacttctgacctcatgacctgcccgcctctacctcccaaagtgttgggattacaggcgtgagctaccacgcctggccagaactatcatttgattcagaaatctcatcattgggtatctacccaaagaaaaatagtttattatatgaaaatgatacgtatacttgcacatttattgcagcatgctcacaacagcaaactgtatatatcagaaaagcttaatattcaaaatatatagaaaattcaaagcaaaagcaagtataataataacaataataatccaactaaaaaatggttgaaagagtgaaaaaaatattttgccaacaaatatatacaaatgaccaatagatatataaaaaagtgctcaatatcacctaccaaaaggcaactgcaaatgaaaacaatgatgagctatcactcgaaatctgttaggattgctaatattaaaaaaaaatagagaagtaacatctgtcattcatgttcctgtgatttctgaaacaaatcttaatatcaccactcctcttacacatttcagacatgatgggaaaagaaacgttaaatgatctaacatgcagttcctctaaaatactcagaaatattcttatactcccccaaaacaatggaagagcaggcatatcatgcagcaccttataagccataaagaggactttagctctcacggtaccctctaaggaaaatcactaaataggaagtaggatccttaaagaatttaagggtatgggacaaaagatgctcctatttgggagctagagaaataaatggctttttaggaaacctttccatggaagcagagcattctataccacattttaaggtctgaaattctttctgaccttcgtatccctcgtctctgttatctgcttcattcatgcttacctacctgagaagctgactactgtctcatgtctcttcacattccagggctcttttatttgctcaaagcaggatatcagatcagagttagagacagcaaggcctgttttgttagaaaaattagcatgactttctgggatcctccagttaccaacctagtactatgttcagtagagaggagagaatattatgaaagattctagaaatttaattccaaaatactgttttctgacagaaacttttgaatatttaaaacatacgtgacatttctgggtccttagctctactatccaatactgaatataaaattagtgctggatattggattttaatatttgtgcaacagtatttaatgccactgaatttctagaattatcattaatctagagtgaaggatacagattagctcaagagaggggaaggttcctattaagataaaacatcttgaagattttcttatctattccaataaaccttcaagtttttcttaaaagtactgatctaaaaataatttatgcagagcaaaacctcccaaaatcattctacaaagggagaaaatagaagcctgatggtatattagaaaatctggggtatatttattctcaccgagagaccaggtttctatagttctctaacattgcatctctacacaaatttcactgagcaggattcagacattcccactcctcttgagagaattctatggccaaagccttgaatgttaacatttcctaaacaaacccaaacacccacacatatttagcaaatggccatgggcagaattgttaattttactctaggtgtttgagagttacagagactggaattatccaataaaatattgttaaatagagaaagattctgtaatatatttttgcattctgaggaaagaaaatgaaaaaagatccacaaaaccactgtaggtactgtagttttctgaataatacagcataaaatttatggcataaacacaagcatatacagttttgagtgccatatttacattatacacagtaagttctgtccagttctcatatggagaagtcacagtaagttagaaggtacctctccaattttaacgtatatatcaatgagctgcagattttgttaaaatatggattccaattcaagagatctgagatgagacctgagttactgcattgctaacaaactcaccaatgacataaatgattctaacttaaggaaaatagtttgtaaaacatctagtgatagaacctgggttttgtccccatgtatatgaccagtgaacaaagatgacagccttcattttccaaagcaagatataaacaagagaaactattaagataagggatgtaagaaaaatggatgtgctgtggtcaataataagctgaggtaaacatctggttcagcatgactcagtgagtttgagtgcaggtgcacaattctgctcattatgtaacctagttctgtaagctcatacttggctttgagccactatcgtgtgtaaggagtacacagacaggtagacaggaggggaagagagagagtaaagccgctgaccctgcacacatggctcatgcccaggcttctgcccagagagataataaagccatatcaaaactgcccacaattcctcgagtgtttttccagcaacccaccactcgcccactgacttctatcagacctcagcttgggctggaacctgacacttagcatgacaggggagctttcagattaaatgtgattgtttctgcacattagtcagaaagtctctcgaaaatacctgttaataatacagtttttagaaagtaattttaaagtgaagaattccttcaggaaacatgctaaccaagtgaataaaatggacagattggcatcaggtgcggatgcatatatgaggatgcaacatgacttctgtgagattactggccaaaaatcataaattattattatttatttatttgttttgagatggagtctcgttctgtcacccaggctggagtgcagtggcgtgatcttggcttactgcaagctccacctctcgggttcacgccattgttctacctcagcctcccgagtagctgggactactggcgcccgtcaccatgcctggctaattttttatatttttattagagacgaggtttcaccgtgttagccaggatggtctcgatctcctgacctcatgatccgcccgcctcggcctcccaaattgctgggattacagaggtgagccaccgcgcccggcaaaaaacataaattataatctgaatctaatcatgaaaaacatgttttatgcaaagttcaagccacatatgatgcccatgttttgtaatttctagcagtctatttaaatactgtctctttagcattctagaagacacatttctttgaattaattcctttacatacacatctttctaaattattccaggctattaattccatcctttttcagtggggattttaaaattatgttcttcagagagctgatgaagcattcagatggaacctaaacggtgcacttttctccctcactgatatctgaggacccagcagcaaccccaataagaatgttttatatccctgaaagattctcccgaaaacttaagggaatgaataactcctccttccacaggcctagtccaaaggcacaaagccccttgcaccagcagcgtgcgtcagcaagagagcggaagcaggaacagttggcaggaagacacataccccctgaagatccagagggaggccatctgggtacagcagctggacaaaagaagctcctcagcctccagtcgcctgtctgtgcatgcccctcggtcactgatctcacctaccagtaagtatcctgggagcccagttaacagggaaaaatccacacagcctctcttgctctctccagtccaaaaatccaatgttggcccaagaaggctctggcatgtgccaggcacttgctgatcttttggtcttagggggatgcctctaagccatttgatcccgttctaggaacaaaaaaggcagtggtgacaatcgctccttttatcatctccctccagcttcccaggatggtccccttttccctgttctctctagcctaacctcggttatgggaaatctcaagttttccattccaaaggacatccttctaggctgcctcataaaaaaacctacaaacctcaggcctcagtcaagatatccgtgccttgtcttgttttacaattcaatctggccacaatacgaattggataatgggtccaaatggcccacaaacggaacattggactttacaattttaactgacttaatcaattattgctgatgactggaaaaatgaggagaaattacttatatccaggccttttttgcactcagatcacaacccaacctctgcaattcttgctcatgtgttcaaatcctcctcctctgttctcaccacccagattgccttcctcttcccgaccctacctctttttcctctttggatccagcagactgctgtccaccctcccagcccctacctctccctctcaaccatcttctttcacccccaagccttttctttatcttctcagccacaatcttctcagtcaccatcttctcagcagcaatattcccagccaccatcttcccagtcagcagtatccacttcttttcctatatcgtcccctcctcaggacaattctagtattgcctgtacccactgacctcccccaccgccctctcctgaggcttgtaaacccatcccgccactttacactcctatctatcctccactgcctgttaactcaacccccctcccctgttcaaaccctcagcaggaaccacttccaggttcctccttctctcccatccacacttgctcaggcgccacctttagcccatgccccactcttacttcagcggctgtgctacagtgcccccttcaggaagtggcagaaactgaacatgttgttagagttcacattcccttctccctcactgatatctctcaaattaacaaaaagactcagttcatttccagaagaccctacctcttatattagagtttcagtacctcacccagtgttatgaactaacttggcatgacctctacattatcctctctgccaccctctccccagaagacgaggaccgtatctagaccccagctcaggtgcatgccaatacaattcatcaccaggctcctgcccagcctactggtgcacaggcagttcccaaccaggaccccactgagattatcaagatgtggtccctggatgccaccatcgagacaacatgattgtgtgtctccttgcaggactcaaaaagggtgcccataaagcggtaaactatgaaaaactttcagaaatcacccaaggtcataacaaaaacccagccctttttctctcttgtttaactgacgccatgagaaagtataccaacgtagacccagctatcccagaaggaaccactaaacctttctccctctataccgatgaatggtgtggagttgcagtaggtgttctaacctagtataagggacccaccctccaggtttttgcctacctctctaaactgcttgaagccacagttctcagatggcctgtctgcctctgaacattgacggcagctgctgtccttgcccttgaaagcctaaactatctctccatgccaacttaacagtttattcaatccataacgtcaaagaaagacatgctagctcaccgcagtttcctctctcccccacggctcctccaactgtatgctctattcatagaagctccgcacatcaccatggtaaccagctcccatctaaacttggccacgccaaagatcctacatacttctgtatcaacactgttcaaacctttcttataccttttccaaacctaacagaccaaccccttccagatgcctctttacttggtttgtagatggcagctccttcctacatcaaggatgccggcatgctggctatgctatagtgtcaccccccctacacactgttcaagccaatatgctcttcctaggcaccacctcccaaaaagctgaactcatcaccctcattcgagctctcactctagcagccagtcaacagatcaacatatatttaaattctcattatgcgttccacatagtgcattcacactcgtccatctggaaagaatggagtttcctaactgcaaaaaaacactcctgtcataaatgactctatcagcaagctccttcaagctgccagactcctgcagaaagctaccgtcattcattgcagggaccatcaaaccccagacaatcctattttggtgggaaatctagcagatagagaagccaaacaagtagccctacaacctgtacaaggccagtttctgtgcctgtcctcgttctctcctctttactctccagaagaaaaggaggactaccaagcccaaaaccttcaaaaacaaggaccatggtatgtcaaggaagggtgcttccttcttcctcactctcaaacaatctctatcctccaaagcctccacaactctttccatgtcaattacaaacctctcctgcaacttctccaccctatcctcacttgtcttcacctttccagccgtgtttgagagattacccagtcctgctctatctgccactcagtatcaccccacagttccctttggccactgccttttcctacccactaagcccagggccaggtacccaggcaagattttcaagtagacttcactcacatgccacccaataatggctctgctatcttctagtctttgtccgtactttctctgggtgagcagaagcattcccaacaacttcagaaagtgcaaatgtcatcacacaaactctcaacatgcatataattcccaattttggactgccaacatccatccagtccaataatgggcctgccttcctcagacaaattacccaaggcatctctatatccttaggtataaaatgggttctccacacaccctacaggcctcaatcttcaggcaaagttgaaaaaaattacctctcttgttaaactcaccaagttggctctagtaaccctccagtggtggacaaaaaaatctccctttttccctcatgagattctgtgcaacaccaaaggcacactctttttatagtccctttgaaatcatgtatggctgaatgttgcgggaagtcagggaccctgaacggagggaccagctgaagccgtggcagaagaacattaattgtgaagatttcatggacatttattagttcccaaaattaatacttttataatttcttacacctgtctttactgcaatctctgaacataaattgtgaagatttcatggacatttatcacttccccaatcaatactcttataatttcctatgcctgtctttactttaatctcttaatcccatcatctttgtaagctgaggatgtatgttgcctcaggaccctgtgatgattgagttaactgtacaaattgtttgtaaaacatgtgtgtttgaacagtatgaaatctgattgtaaaacgtaggtgtttgagcaatatgaaatcagggcaccctgaaaaagaacagaataagcgattttcagggaacaaggaaagataaccataaggtctgactgccttatggttatctctattctgcagtctgactgcagaatacagccatatttttcttctcacagacagcctatggatggacgtgtgagtaggataaatatcactgaattcttttcccagcaaggaatattaataattaataaccctggggaaggaatgcattcccaggggtaggcctacagatgactgttctgggagtgtctgtcttatgcggttgagagaagggatgaaatacaccctggtctcctgcagtgtcttcaggcttgctaggattgggaaattccagcctagtgaattctagtcagaccagttctctgctcttgaaccctgtttcctgttaaaatgtttatcaagacaatgtgtgcctagcgggacatggacactcattggtaattctaattttgcccttgccttgtgatcctgctctacccttttgccttgtgatcttttattgccctttgaagcatgtgacctctgtgactcactcccaattcgtacgcccctccccttttgaaatccctaataaaaacttgttggttttgtggcttggggtcgccatcatggtcctaccaatatgtgatggcatccctggaggcccagctgtaaaatttctctctttatactctttccctttatttctcagaccagccgacacttagggaaaacagaaaataacctacattgaaatattgggggctggttcccccgatagccaaacttttgtcttggggcctctacccttcccagattctgagccattcaggaattacctcccctccttaatccagacatggtctttcattcgtgaagcggcaaatgaggccatgccccttcctgtcaacacctccttgtcctctcaacataactgtcttgcaggcacagatgtgtttatctgccaacccgagcctcacaaaaacctacaactgaagtggacaggcccctacactgtgatacgcagcatgccaactgcagtgagagtccaaggactcctcaactggattcatcgcactagggtcaagctcacccccaaggctactccttcctccaaaacattaacgtgggcaacactctcggagtacctgtatgtaataataatttaaaacaaacaaacaaacaaaaacaaccatgatccataaaggcaggaggaagccaaagatggcaacaggatgaatggcctccgcaacggatcatcgaatattaacagtcctgccacttggactgaggatagttcatggggttattgcactcccatatatactctaaatataataattagactacagggggttctagagataatcactaaccaaaccgcctcagccttggaaatgctcacgcaacaagaaaaccaaatgcgtgcagcaatttatcaaaacaggctagcactagactacttattagcagaaaaaggtggggtctgtggtcagtttaatatctccaattgttgtcttaacatagacgataacagaaaagcagtactagaaatcacttcaaacatcagaagagaagcccatgtgccagtccaaacctggaaggggtggggcccaacaaatctttaaggagggtggttctctaatttagggggatttaaaatgctggtaggaccagtaatcttcatcactgggttcctcctgtttctctcctgtgttatcccactaataataaaagccattaaaactcttattgaaactaaagttagctgccagacaatccagaccatgctcctgctacaatgacacgatggataccaacccgtctctcaagaataccccaaaaattaagtttttattttgcgaaggtgcccatgccacccctatgtcatgcctgaagtagttattgagaaagttgtcccttttttctataaccaaatagacaggaatgaaagattctccctggggtctgaacgcttaagggaatgaataacttctccctcctcaggcccagttccaaggtgcaaggccacttgtccaagtagcgtgcatcagcaagatagcagaagcaggaagagatatggccaggagacacattccacctgaagactgagagggaggctgtccggtaccatgtaacagttgcgtcagactgggacacttcctttttacagaggactataaaacccctgccctgtccttacttggggctgatgccatttcaggcctcagcccgcctgcaccgagatgctcattaaaacagtgtgttgctccacattgcctcatcttgtctgttggcacgctctcagggttcgaaccaatataagagccttgcaatccgcacctgcccaagctgatctgtcaacaaagaaaatactttcatgccgggcacggtggctcatgcctgtaatcccagccctttgggaggccgaggtggacggatcacctgaggtcaggagtttgagaccagcctggccaacatggtgaaacctcatctctacaaaaacacaaaaattagctgggcatgatggcgcatgcctgtaatcccagctacttggaggctgaggcaggagaattgcttgaaccctagaggaagaggttacagtgagccaagatcacaccactgcactccagctggggagacagagcaagactcaaccacagaaaaagaaaaaaaaaaaaaagaaagaaaagaaaagaaaaatgctttcaatacttcagggtataaattcaagtgagtattatttgtgatatgtaagaaggctggatggagagagttaaggctctgataaatcggggagaattattttaaagagatcctttcactgtcatgagaagaaaagggaaaaggtagttaaaataatcttgttaggcaaaagcatcagaagtagaaatgtaaatgattgcaattctaaatacatgacattgtagaagaaaatgtgaacagttttgacctgggacacacttatctaagaatcaaccattttttctctcttctctaattctttctcaggtgagattatctgaacaaatcaccaccttcatcttgagaatgtatcttcaaaggcattaggatagaccctctgaaggaaatagaccgctcctgcaggacccgggagacaccctaaatactgtgagtgccccaactgcagaaatgggaaagggagaccctcctctcctgaacacacacccccatacagggtggaggaggcagtagggaggccctgggagctcgctgaatcccgaagcagcccattcctgctggataccacaggaatccatcaggagggaggacagaggagcagggtgtaaaacactgaagggagaaggacttccctagctcaactttgcaagaatttgaatgaggcaagaagcctcctggccagaacccaggggaaggcgagaacctggcttgcagacttcacaggcagggaaaaactaaagccctgttctttcccagctgggaggcaggaagccttaagaaattttcaagcccaacttgccctccacctggaaacagactcggggctgttgtgggggcaaagtgaaagtgagacccgctctttggtttgcatgggagctgagtgaggcttatgactgccggctttcccccacttccctgacatcctgtatgactcagcagagacagccataatcttcctaggtacaaaactttagtgacctgggaatctcacccccatcccccatagcagccgcagcaagacctgcccaagaagagtctgaactcagacacatctagcacctcccgcacccaatgattcttccctacccaacctggtagtggtagacaaagaacatataatcttgggagtcacaccactgcactccagtcttggagacagagcaagactctgtctcaagaaaccacacaaaacaccaaactatgcaggcaacaaagagcatgatgaatgcaatggtaccacacatttcaatattaacattgaatgtaaatggcctaaatactccaattaaaggacacagaactgcagaatgaataagaactcaccaatcaactatctgctgtcttcaggagactcagctaatacataaggacccaaataaacttaaaggggtggaaaaaggcatttcatgcaaatggacacccaaagcaagcaggggtagctattcttataccagacaaaaccaactttaaagcaacagtgattaaaagagacaaaaagggacattatgtaatggtaaatggcctggtccaacagaaaaacatcacaatcctaaacatatatgcacctaacactggagctcccaaatttataaaacagttactaatagacctaagaaacaagatagacagcaacactgtaatagtggcaaacttcaatactccactgacagcactagacaggtcatcaagacagaaagacaacaaagaaacaatggatttaaactataccctggaacaaatggacttaacagatattagaaaacatttcatccaacaaccgcagaacacacattctactcaacagtgcatggaactttctccaagatagatcatatgataggccataaaataagcctcaataaatttaagaaaattgaaattatatcaagcactctctcagaccacagtggaataaaactggaaatcaactcccaaaggaacgttcaaaaccatgcaaattcatggaaattaaataatctgctcctgaatgagcactggggcaaaaacaaaatcaatatagaaataaaaaaattcttcaaactgagtgacaataatgacacaacctatcaaaacctctgggatacagctaaggtgatgaagaggaaacttcacagccctaaatgcctacatcaaaaggtctgaaagcaaaaacggaaaatctaaggtcacaactcaaggaactagagaaacaagaacaaaccaaaccgaaacccaacagaaaaaaaggaaataaccaagatcagagcagaactaaataaaattcaaacaaaaaaatacaaaagtaaatgaaacaaaaagtgcttatttgaaaagataaataaaactgatagaccattagcaagattaaccaagaagagagaaaatccaaataacctcactgagaaatgaaacaggagatataataactgacaccactgaaatacaaagaatcattcaagactactatgaacacctttacacacataaactagaaaacctagaagagatgaataaattcctggaaagatacaaccctcctagcttaaatcaggaggcattagataccctgaacagaccaaaaacaagcagtgagattaaaatggtaatttaaaaattaccaacaaaaaaagtccaggaccagatggattcacagcagaattctaccagatattcaaagaattactaccaattcttttgacactattccacaagacagagaaaggaggaaccctccctaattcattctatgaggtcagcatcaccctaataccaaaaccaggaaaagacacgaccaaagaagaaaactacagaccaatatccttgataaacattgatgctaatatccttaacaaaatactagctaacaatatccaaaaacatgtcgaaaagaatatccaacaacatgtcgaaaagataatccaccatgatcaagctgatttcataccaggtatgcagggatggtttaacacacacaagtcaagaaatgtgatacaccacataaatagaattgaaaacaaaaatcacatgatcatctgaatagatgcagaaaaaaaaattgacaatatttagcatccctttatgattaaacctctcagcaaagttggcatacaagggacacagcttaatgtaataaataaaagctatctatgacaagcccacagccaacataatactgaatagaaaaaagttgaaagcatttcctttgagaacgggaacaagacaaggatgcccactctcactactcctcttcaacatagccctggaagtcctagccagagcaatcagacaagagaaagaaatgaagggcatccaaatcagtaaacaggaagtcatactgtccgcttgctgatgatgtgatcatttaccttgaaaaccctcaggactcctccagaaagctcctagaactgataaaacaattcagcaaagtttcaggatacgagattaatgtacacaactcagtagctcttctaataaccaacagcaaccaaatggagaattaaatcaagaactcaacctcttttacaatagcgggaaaaaaattatatgaatatacctaacgaaggagtcgaaagacctgtacaaggaaaactacaaaacactgctgaaacaaatcatagacaacacaaagacatggaaacacatcccatgcacaagcatgggtagaataatttgtgaaaatgaccatactgccaaaagcaatctataaattcaacacaatccccatcaaaaaaccaccgtcattcttcacagagttagaaaaaacaattctaaaattcatatagaaccaaaaaagagcctgcacagccaaagcaagactaagcaaaaagaacaaatctggaggcaccatactacctgatttcaaactatactgtaaggccatggtcaccaaaacagcatggtgctggtataaaaataggcacatagaccaatggaacagagaacccagaaataaacccaaataattacagccaagcaatcttcaaaaaagcaaacaaaaacataaagtggggaagtataccctttcaacaaatggttctgggataattggctagccacatgtagaatgaaactggatcctcatctctcaccttataaaagaaaccaactcaagatggattaaggacttaaacctaagatcagaaactataaaaattctggaagataaaattggaaaaaaacccttctaggcattggctaggcaaaaatttcatgaccaaaaacccaaaagcaaatgcaataaaaacaaagataaatagctgggacctagttaaactaaagagtttttgcatggcaaaaggaacagtcagcagagtaaacagacaactcacacagtgggagaaaatcttcacaatctatacatctgacaatggattagtatccagaatctacaacaaactcaatctatacctccgacaaaagattaatatccagaatctacaacaaactcaagcaaatcagtaaggaaaaaaacaatcgcatcaaaaagtgggctaaggacatgaatagaaaattctcaaaagaagatatacaaatggccaacaaacatataaaaaatggttaccatcactaatgatcaaagaaatgcaaatcaaacccacaatgcgataccaccttattcctgcaagaatagccataatcaaaagatcaaacaactagatgttggcatggatgtggcaatcagggaacacatctatactgctggtgagaatgtaaactgatagagccaccatggaaaacatataaatgcatatggaaaacagtgtggagagtctgtaaagaactaaaagtagaactagcatttgatccagcaatcccactactgagtatctacccagagaaaaagaaatgattatttgaaaaacgtacttgcagatgcatgtttctagcagcacaattcacaattgtaaaatcgtggaaccaactgaaatgcccaggaattaacgcgtgggtaaagaatctgtgaaatatatatatgtgtgtgtatatatatataaatatataaacacttaaaatgtatatatacacacacatgcacacacacatacatatatatatgttggaatactactcagtaacaaaaaggaatgaattaacagcatttgcaatgtcctggatgagattggagactattattctaagaatggtaaaccaaatatcgtatgttctcactgatatgtgggaggtatgctatgaggatgcaaagacataagaataatacaatggactttgggtacttgcggggaagagtgaaaggggaagggataaaatacagcatatatggtgcagtgtatactgcttgggtgatggatgcaccaggatctcacaaatcaccactaaagaacttactcaactaaccaaataccacctgtacataagtaacttatggaacaataaaattttaaaaaagtatttttataattacagacaggctcacataatgaattcttcataaactattacacaggccagccgggcctggtacctcatgcctgtaatcccagcactttgggaggccgaggtgagtggatcacctgaggtcaagagttggagaccagtttgaccaacatggtgaaaccctgtctctactaaaaatacaaaaattagtccaggcgaggcggctcacgcctgtaatccagcactttgggaggcagagacgggtggatcacgaggtcaggaatttgagaccagcctgaccaaaacggtgaaaccccgtctctactaaaaatacaaaaatgagccgggcgtggtgatgcatgcctgtaatctcagctactcaggaggctgaggcaggagaactgcttgaacctgaaaggcggaggttgcagtgagcccagattgcaccattgcactccagcccgggagaaagattaagactctgtctcaaaaacaaacaaacaacaacaacaacaaacaattaagcaaacaaaaaacctattaaacaacaacaacaaaaaattatgggtctagcatgagtaccagtcaagttaaaacagaatttgcatggggagactctgaaccataagccaaaagattgtacagcaagaaattcaatacaaagcagagtataaatttgctttcagcatttttgagaatttttgttttgtagtaaattagacacctccttaaaatgattttgttccaatattgcttttttctgctaaaaatagtttcgaacttaaacacactccataatttatttacacctaagattcatcttagactaacagatgtgtatatttaactctatgtaaatcaatactaacagtccatatgtgcttgcaggcagaggccacatgttcgaagaaaaatatatgaaaaaattaaaaaagatttattcgggactcagaaatatatggattttacttatgtttgtatataagttttattatgaccataaaaataatcctgtagtcaacaacaatttaattgtacatttaaaaataactaaaactgtagaattgaattatttgtaatacaaagaataaatgctagaggtaatggagaccgcatttagtctaatgcgattgttatatattgtgtgtccgtatcaaaatatgccacatatggcataatatgtacacatattaggtatccacaaaaattaagtcaaatacatttaaatgagaaaataaaaataaaaatttagcctatgggaacaatattctttaacttaatggcaattaaaactcactggcaaaaaaaatcactagagatgtcagtccattatcttaccaaatagtgtatttttaccatcttttacctacacccttgagtaaggtggaataggttaaagttactggcataataacacttcattgaattcatgatagtatttaacatgttaaaactgtttggttgaaaagttcacatgcaatttataatttaaaaatatgctacatatatttcataaaaatacaataaatcatactaaactttaactaaaattaagaatgtttttctttcataataatgcagaatattaatctgaacatctacctcatgcatcactcgatattataagttaaccataaagatcctctctacttaaattttcatcatgcatcttacatttttaatgtccttacctttccatagaaaaggtcataaataatgcctcttcatatttgtaatgctttttcaaaatactcttctgtactttaaagacatattttctgatcagtcgtttgacagtaattacacttcttatttagtatgaacgctctgaatttgagtacgatgtgagcaggtattaatggctttttgtctatatttgttcactttttctcaagcataaatgctttcctatgcattaaggtgtgagcattagttcaaagcttggccacattgttcacactggtagttttctccagtatgaattatcttacctacgatcaagtgtgacaatcatttagaggctttgtcacattcttcacatttctaggatttctcagcagcatgattttcttgatgtttagaaaagtttgacttgtcaaaagcgttggcacatctttcaggtttgtagagtttctctccagtatgaataatattatgtctgttaagaattcaggactttttatagactttaccacattattcacacttgtaagatttctctccaatatgagttatcttatctgtagtaaggtgtgaaaactggttaaaggctttgccaaatttttcctgtttgtagggttgctgtccagtatgaattttcttatgtctggttagggctgaggaccagaaaaaggatttgccacattcttcacatttgtagagttttactccagtatgaattaccttatgtttagtaaaggttgaagaccggttaaaagatttgccacattctttatatttgtagggtttctctctagtatgaattttcttttttttttttttgagacggagtctcgctctgtcgcccaggcttgagtgcagtggcgtgatctcggctcactgcaagctccgcctcccgggttcacgccattctcctgcctcagcctctcgcatagctgggactacaggcgcccgccaccacgcccggctaattttttgtattttttagtagagaaggggtttcactgtgttagccaggatggtctccatctcctgacctcgtgatccgcccgcctcggcctcccaaagtagtgggattacaggtgtgatagtatgaattttcttatggttagtaaggattgaagactggttaaaggctttgccacatttttcacatttgtagggtttctctccagtgtgaattatcttatgtttagtaagagctgaggactctttaaaggctttgccacattctccacatttgtagggtttctctccggtgtgcaacctcttatgtctagttagggttgaagattggctaaatgctttgccacattcttcacatttgtagggtttctctctagtatgaattctcttatgtccatttagggttgaggatgatataaatgctttgccacattcttcacacttgtaaggtttctctccagtatgaattatcttatgtgtagtaagctttgaggatcgattaaaagctttgccacattcttcacatttgtatggtttctctccagtgtgcatcctcgtatgtctagttagggttgaggattggctaaatgctttgccacattcttcacatttgtagggtttctctccagtatgaattatcttatgttcagtaagagttgaagatttcctaaaagctttgccacattcttcacatttgtagggtttctctccagtatgaattatcttatgtgtagtaagggttgaggattggctaaaagctttgccacattcttcacatttgtagggtttctctccagtgtgcatcctcttatgtgtagtaaggtgtgaaggctggctaaatgctttgccacattcttcacatttgtaggttttctctctggtatgaattctcttatgttcagtaagggttgaggaccagataaatgctttgtcacattcttcactcttggaaggtttctctttagtatgaattatcttatgtgtcgtaagatttgaagattgattaaaagctttgccacattcctcacatttgtagagtttctctccagcatgtattattttatgtttagcaagggctgaggagtgcttaaaagctttgccacattctttacatttgtagggtttctctccagtatgaattgtcttatgcttagtaagggttgaggaacggctaaaagctttgccacattcttcacatttgtagggcttctctccagtgtgtatcctcttatgtctagttagggttgaagaccatataaatgctttgccacattctttacatttgaagggtttctctctagtatgaattcttttatgtttagtaaggcttgaggaccagttaaatgctttgccacattcttcacacttgtaaggtttctctccagtatgaataaacttatgtatagtaagatttgaagatcgattaaaagctttgccacattcttcacatttgtagagtttctctccagcatgtattattttatgtttagtaagggttgagagtcgcttaaaagttttgtcacattctttacatttgtagggtttctcttcagtatgagttatcttatgattagcaagggttgaggaattgctaaaagctttgccacattctttacatttgtagggtttctctccagtatgaattctcttatgtttagcaagggctgaagaatggctaaaagctttgccacattcttcacatttgtagggtttctctccagtgtgtatcctcttatgtcttcttagggttgaggaccatagaaatgctttgccacattcttcacacttgtaagacttctctccagtatgaattatcttatgtgtagaaagacttgaggaatgattaaaagctttgccacattcttcacatttgtagagtttctttccagcatgaattattttatgtgtagtaagggttgagaattgcttaaaagctttgccacattctttacatttgtagggtttctctctactatgaattatcttatgtttattaagggttaaggattgtctaaaagctttgccacattcttcaaatttgtagggtttctctccagtatgaattatcttatgtttagtaagggttgaggattgcctaaaagctttgccacattcttcacatttgtagggcttctctccagtgtgtatcctcttatgtctagttagggttgaagaccatataaatgctttgccacattctttacatttgaagggtttctctctagtatgaaatcttttatgtttagtaaggcttgaggaccagttaaatgctttgccacattcttcacacttgtaaggtttctctccagtatgaataaacttatgtatagtaagatttgaagatcgattaaaagctttgccacattcttcacatttgtagagtttctctccagcatgtattattttatgtttagtaagggttgagagtcgcttaaaagctttgtcacattctttacatttgtagggtttctcttcagtatgagttatcttatgattagcaagggttgaggaattgctaaaagctttgccacattctttacatttgtagggtttctctccagtatgaattctcttatgtttagcaagggttgaagaacggctaaaagctttgccacattcttcacatttgtagggtttctctccagtatgaattctcttatgtttagcaagggttgaagaatggctaaaagctttgccacattcttcacatttgtagggtttctctccagtgtgtatcctcttatgtctagttagggttgaggaccatagaaatgctttgccacattcttcacacttgtagattttctctttagcacagattattttatgtgtagtaagggttgagagctgcttaaaagctttgccacattcttcacatttgtagggtttatcttcagtatgaatttccttatgattagtaagggttgaggaccaatgaaaggttttttcacattctttacatttacaggacttctctgtaatataaacgcatttatgttgggttttgtgtaaacggatgcaaaatgacttgacacattttttacatttgaagcatttctttccagtatgtcttatcgtatgtctgtttgaatttaaaaatttatagaagactttcaaatatttcccacattgaaatactttgctctgggcagttgtgagacactggttaagtttattataaccttctttgtgcaccttacactcatccacacttttacaaccttttcttaactgtaaattctcatgtccacatttttcatattttctcagtaatactttttgaaaagaatcttccatgctctgctctggccaaaagtcttgaggaaaatgaggacatatacctgaaaaaaaaaaactaaaaataataaattactccactcacctagactcacatgaatatagtttaaaaatcttacctacaaaattatacaaactacataaacaatatggcactgcaaaataccacaggccctaattctatttttgtttttttgtttgtttgtttttgagacggagtctcgctctgtcacccaggctggagtgcagtggtgcaatcttggctcacagcaagccctgcctcctgggttcacgccattaccctgcacaggccctaattctttcatagacatatatatgtaacaaaaacatacagatcaaattacatctatggaaaatttatgaatgagttaagtgtgtgcagtgtctcaggggagcacaatgcaaaaaaccacacagaaaaaaaagaaaagtctgttaaatttacttgacacagcttttcctgcttcccattataacagagtgcctttagaagtaaattgccaactcctggtttatgttttaaaagaaaggtaaaatagtagcccattcatttttatttacagcttttaggggcttttcctgacactgatttccctctctcatgacataagtgttgaaagaaaccgtggcataatttggaatgaaagtttgagtctgctgagaccaaagaaaaatgttacagcagcagagagactgcagtaccacagaaaggaaacaggcatagcaagtgattactgactcctacaaagtaacataagtaaacactcttaattaagacataaacacaaaatttcagacaacacatatcctaagaacatatttgagaaattcccataatcattagacaagacagttgttttcaaactatgccaggacaaaactacattataaagactttgacagttagcttttttaaatgtccaaatctcaatcaaagattataatgtatacaaaatagggcaatatgatgccaccaaaatattataaaattttctgaaagaaaccataaaagagatgtatacattaattttatgaattggtaatgaataatactcactgattaaaataggaacagagacaactatggaaaatcggaaaaatgaggatgagaacaaaaatatttaagatttcaaaaaagcagaaattgtggaggtaaaaatataaaaactgatagatcctaaaagtaagaaaaaatgatgtaaaaataaagaagctcaacaaactaggatcacagaaagatatttataacaaacacatatataagcacaatttcaaaagtcacagacaaaaaaaaaatctttgaagctgcaaaataaaagtgatgtgccaggccaggccaggcatggtggctcacacctgtattttaggcactttgggaggccaaggaggacagatcacctaaggtcaggagttcaaggccagcctggccaacatggtgaaaccccgtctctactaaaactacaaaaatcagccaggtgtggtgacacatgcctgtaatcccagctacttgggaggctaaggcagattatgaggtcaggagtttgagatcagcctgaccaacatggagaaaacccctctctactaaaaatacaaaattagctgtgcgtggtggcacatgcctgtaatcccagctactcaaagactgaggcaggagaatcacttgaacccggaggcagtggttgtggtgagccgagatcgcgccattgcactccagcctgggcaacaagagcaaaattccatctcaagaaaaaaaaaatggtagttgtttaatatgtattaagatttagcttgcaaggtaaaaacattttagcaatatgttgcatgaaaatttcaagatgattaatatgactaaattaaatatttattttctggtaaattttgttttttttttgacaagtaaaaataataataactaaaagtacagagttatgatagttttaaattatattcacatttaaaagtgtttctcccataaaaaaatatagattcagaaataaataggatgttgaaattataagaattttatgactactcagctacacaggattagaaaatcactcacaacaaacccacacaacaaatatacaagttataaaaaatacaacgataatatttatacaggcaaacaaacatagagataattctattggaaaaagacatatggctcaatcatatttgatgttgctccagactgtcttaaattgcataaagttaaatattgacatgcacaattattatactaaaatatcaaagcacaattaacagatgtgtagtggcataccctaaaatatataacacaaaaatatacaattgcaaaaccaaattaaaacatggaatgtaaactttattaggcaccatcaactagattaacatattcattaaaaaatcttagaagaagaatatgggaaaaaataatacagagattacttgaaaataaaaaaaggtgagaaattcccaaattttgatgtaataaaagaaaaaaaattctaactaagaatacttgatttaaatttatttcactttaaaaagaagatgaaaataaaaaatttccaaaataaaaagtgagcgtgttcatcaccactagcacagttctacaaaaaaaaaaaaaaatgctacatggtgtccaggcaccgtgggctgatgcctgtaatcctacagttttaggaggcaagcctgtcagaacactagaaaccaggagtttcagatcagcctgagtaatgtgagactctgtaaataacaataagaaatgctgaaatgagtcagtaaaatgagtcagttttgttttaaaaaaatactggacagtatcataaaaccatatataaaataaagctctctattaaatgtaaatacacagacaaatatagaagtcttttttttttttttaattgatcattcttgggtgtttctcgcagagagggatttggcagggtcataggacaatagtgaagggaaggtcagcagataaacaagtgaacaaaggtctctggttttcctaggcagaggaccctgcggccttccgcagtgtttgtgtccctgggtacttgagattagggagtagtgatgactcttaacgagcatgctgcctgcaagcatctgtttaacaaagcacatcttgcaccgcccttaatccatttaaccctgagtggacacagcacatgtttcagagagcacagggttgggggtaaggtcatagatcaacagcatcccaaggcagaagaatttttcttagtacagaacaaagtgaaaagtctcccatgtctacttctttctacacagacacagcaaccatccgatttctcaatcttttccccacctttccccctcctctattccacaaaaccaccactgtcatcatggcccgttctcaatgagccgttgggtacacctcccagacggggtggtggccgggcagaggggctcctcgcttcccagtaggggcggccgggcagaggcgcccctcacctcccggatggggtggctggcccggcgggggctgacccccccacctccctcccagatggggcggctggccgggcggggggctgacccccatacctccctcccagacggggcggctggcctggcggggggctgaccagaagtctttactatcataatgatgatgcttaaaatccttaaagatcttctatagaatatttaaaacagaataaaaatggtaattgtagacaccaaaatcccattttcgataaatagaagattcatataaaaatgaataagaaaacagaaaacctagacaacattatacactgatttatcattctgcatatagaggaatacctgagaatggataatttattaaaaaaccaagtttatttggctcacaattcagcagactgtataaaaagtctgtgccagcatctgcttctggtgagagtgtcagcaagcttacaatcacggttgaaggcgaagattaactgtacacaccacaagataacagacagagcaagtacgaggtgaaggagccaggttcttctaacaaaccagctttcatttgaattaataaagtgcacacattttgattaccaagaggatggtgccaaactattcataaggactctgccccatgacccaaacacctcctaccaggtccgacatctaacatcaagaattacattgcagcataaggtttgagtaacatcaacatcaataccatattatagaccaactaggtttaacagacatgtacaaaacttttcagtcaaaagcaagggaatatgcaatatttttatttgcacctggtgtattctgttacgacacatactaagttttattaaatttaagaatgccaggtgggtggtgtagctcatgcctataatcccaacacatagagagaccaaggtgtgaggatcacttacagctaaaagtttcaggccagcctgggcaacatagtgagaccctatccctacaaaataatcaaataattattcagacatggtactttgtttgtagtcccaactacttgagagacttaggtggaaagataacttgagcccagtaggttgaggctgcagtgagtcaagattatgccaatacactccagcctgggtgacagagtaagatcctgtcttcaaacaaaaacaacaaacacaaaaaaacaacaaataaatttaagaatatcaatattatccactttgtgttttctgaccaaaactcaaactggagattaaaactgaaaaatccaaaaatacatgaaaataaaaaactcttcaacatatttttgcacaggaataaaaaaattaatttttcaaagatgtcaatacaaccaacagtggtacacaaattcaatagaatctttataaaaatcccaacagtagttttttaaagaaatactgtttgagatgttaaaattttgttacgaactatagccaaacacccatggaaaaaaaacaaaggcattataacttctgattttgaaacgtactaaaagcaacaataacaaaaacaatgaggtactcacacagataaacagatgaaagaacagagtagagaggccagaaatgaacccttctgtatatggccaaataatctcccacaaaattgacatgagcacacaatggaagataaccttttcaaaaaattctgttagaaactgaatatccattctgataaaataaagattatttccttaaaccatatgtgaaaatcttttaattagacataagaaggtaactttgttgttgttgctgttttgttattgttgttttttgagatggagtctcactgttacccaggctggagtgcagtggcgcagtctcggctcactgcaacctctgcctcccgggttcaagcgattaccctgcctcagccacccgagtagctgggattacaggcaccgggcacagcgtctggctaatttatgtatttttagtagagacagggtttcaccatgttggccaggctggtctcgaaatcttgacctcgtgatccacccacctcagcctcccaaagcgctgggcgacgaggcccagccgcataaatttttaatctcttaaacacatagaggggaggcagggcactgtggctcatgcctgtaatcccagcactttgggaggctgagataggtggatcacaaggtgaggagttcaagaccagaccagcctgaacaagatggtgaaaacctgtctctactaaaaatacaaaaattagccaggcggggcggcacgtgcctgtagtctcagctactcaggaggctgaggcagaagaattgcttgaacccaggaggtgggggttgcagtgagccaagatcacaccattacactccagcctgggtgacagagcgaaactccatctctctctctctctctctctctctctctctctctctctctctctctctctctatatatatatgaaacacatgacattagtcttggtgccaaattcttagatacaacattaaatgcatgagcaacaaagaaaaaaaccagaataatttaactacactacacttcaaaatttctgcatacttaagtaaacatttaatagagaaataatgcctcctataaaatggatgaaaatatttacaaattacatgtgataagtgtgaatatccaaaaaatataaacaacttttaaaacggaacaataaagttaaataactttatttagaaataaataattaaaataaattttcataaaaaaacacaaataaaaaaacatttgaaaggacacacaaaattactaatttgtagagaaatgcattaaaatcacaatgagaaacaaaatcccctcacacccacttaaatggtcactatccattttttaaaagcaccaaatctcttgataatgcaatcaaaatgaaacccttggctgggcacagtggttcacacctttaatcccagcactttgggaggccgtggcaggcagatcacaaggtcaggagttcaagaccagcctgctaaacgtggtgaaaccctgtctctactaaaaatacaaaaattacccaggtgtggtgacgtgtgcctgtaatcccagctagtcaggaggctgaggcaggagaatcgcttgaacccaggaggcagaggttggagtgtgataggatcgtgccattgcactccaccctgggcgacagagcaagaatttgtctcagaaaaaaaaaaacaacgcccgggagggaggtggggggcagcccccacccggccagccgccccgtccgggagggaggtggggtgcgcctccgcccggccgctgccccgtccgggaggtggagggcgcctctgcccggccgccccttctgggaagtgaggagcccctctgcccggccaccaccccgtctgggaggtgtaaccaacagctcattgagaaggggccatgatgacgatggcagttttgtcgaatagaaaagggggaaatgtggggaaaagatagagaaatcagattgttgctgtgtctgtgtagaaagaagtacacacaggagactccattttgttctgtactaagaaaaattcttctgccttgggatgctgttgatctatgaccttacccccaaccctgtgctctctgaaacatgtgctgtgtccactcagggttaaatggattaagggcggtgcaagatgtgctttgttaaacagatgcttgaaggcagcatgctcgttaagagtcatcaccactccctaatctcaagtacccagggacacaaacactgcggaaggccgcagggtcctctgcctaggaaaaccagagacctttgttcacttgtttatctgctgaccttccctccactattgtcctatgaccctgccaaatccccctctccgagaaacacccaagaatgatcaataaaaaaaaaaaaaaaaagcaaaaaacaaacaaacaaacaaacaaaacttatattgattgttggtggaaagcaggatgcacccattattttataatgttataaatgtactttaaataaaattattatcaaatacagcaattccatttatgaatctatatctaaaatatgcatcataagaccctgaagacatatttgatacaacggagtattattcaaccttaaaaaaaaacacaaaaaacttgtcacatttaaagatacactttgagattatgtcaactgaaataaactagtaacgaaacgataaatgttatgatttcactaagatatataaaatagtcacactcataaaaacagaaagtggaagggtgtttgtcaagggctagagagagcataaaatggtcaaatgttatttaatgggcatttcattttaattttgcaagatgtaaaatttctagaagtcttttgcataacaatgttaatattaacaggcctgaaatatacagttttgtttagttttttgagacagggtctcaatctgtcacacaagcttgagtagagtggcacattatggctcactgcagccttacactcccaggctcaaataatcctgcccctcaatctctcaagtagctgggaccacaggtacacaccatcatgcctggatatttcttacataaaaatgtttgtagagagggtgtctccatattttgcccaggctggtctcaaacttttgggctcaagcaatcctcctgtcctggcctctcaaaatcctggtcttacagaagtgagccaccaccatgcctggccctgacatgtacattgaaatagatttaagaaggtaaattatatgttatgtgtttttacaacaattattttaggaaaaaagacagaaaaaataaagaattataaattttcttgaaaattaccttcaaatcacaaaaactttttttcacacaaaggaaatacatattcatcattaaacacatggtgaaaataatgctatttcaaaggctactcacttacacaagacaaaaccaacattgaaagtgaactaagaggctgggcaaggtggctgacacctgtaatcccagcactttgggaggccacggcaggcagatcacctgaggtcaggagctcaagaccagcctaaccaacatgagagaaaccctgtctctactaaaagaaaaatacaaaattagccgggcatggtggtacatgcctgatatcccaggtacattagaggctgaggcaagagaatcgcttgaatctgggaggtggaggttgcagtgagccaagatcatgcattgcactccagcctcagcaacaagagcaaaactccatctcaaaaacaaaaaagaaaaaaaaatgagataagaaagaatatatacaagataagctataaccaaaactggggtcatatttgtagacataaaaacacacatatataatctgattgtgatagacatatggctcatttatcttttaattaaatcccacactgacttaaagtatacaaacagaattgcaaattgtctaaaattataatacataagtaaaaccaaaaaacaataaactcatattaaggaacttacactaaaaaacacactaatgtagaactgcaagaaaataatgaaagaaatgtttactcataaaatctagttggcaacattaatgtacgttaacaaataatttgtctagaaaacggcaatgtttgactaactgtgcagtcatggaaggcaggcactttaaattactggtatctattgtatggcaataaaatcccagagaaaatgtagtacaatcataaataggagatgctaatgagaaacttaatagataagcatttaaaagaaactagtgtcaatttttatgttttaaatatgtgctatttttacacaaaataaaattactgtaattcaagtttagaaccaactatagccttaaattgctaaattatgtatatatttagcaaaatatggttagagcttcatgtataaaacaaatatttgaggaatacattatgttattatttagttacaggctgacaaaagtggctgaaaattctgtaattcctatttgcctgcctgtatactaattacctaactcacacacaacatgtacattctagtatattgtcctaaatgtctgaatccaaaactacagacaaatttgaagtagaaaataaaaataaaaatttatatggagagtgacattaataagataaaaaaaaaaagatgccctatttgcttatctcctgacagcaagaaaatttggcagccattcctgacaaaaatgcgtttgtgagagaaccaggcatcatggttcacacctgtaatgacagctacatggcacattaaagttggagaactgcttccggtcaaaatattaagacctgcctgggttatgttgcaagaccccatctcaaaaataagtgcctttaagagagctctgagatccaggatgggagttatgaaactctgctgaagcccaagatcgaaggtaatcctttttagaaggcaagcctcattcaggcagcaaactacaggactactgtttttggctacagacaagaaaatattccacttaacttggttccactgagaattttgaactgtactctgtaaccatcccaaactcttcccagctacagacttggggaggttctgcccttccagaggcctggaggaagacacccatttatagccatgcagcaggcctgcagactttggcctttactgtggtccctgaagcaggtccatgattcagttccagctctctgagccacagttcatggccggttctgcctatgtagaaacccaaagtaacgtgggaaaatcctctcttgtactagatgaaagccatgctcatccacatcctcatataaagcccaccatatgcagacctgactgcagaaacctgcccttgggtctgccctgcagagcaaagtcctgaaggatattcactctgtccaaaaattaaatgagaattataactatccaagccccttttaacaacacaactaaaggtggacccttgtgcaaacccagcagacttaagaccaagctacaacccttcttcactacaaacccagatgacattctatcactctgaggacccaataaaaatagatttttactttctgaaaccagtctataaatacttgaacaagtgtttgctccttctttacagtcaccgatgcaaaactattgtttcttattgtcaatgcttctattttaacatagcactcaaagtatgtggaagacaaaacagtcaaaagaaaaatttaaagtcattgaaattgaagaccagtaagtaaaatgttgctttttgtagatcatgtaatcttatatatatatatatatatatatatatatatatatatataaataaacagtactttaaaacctgtttaaactaatgaatacactcagttaattagcaaaatgtaaaatgcaaaaaattagcaaaatgtaaaattagcaaaatgcactcttttctatgccatgaacagtactctggctgtcactgtaaacttgaagaaagatcattgaagggaaagtagaattcttagagattttataagcattaacagaagtgatagcataatttaaaaaaaaaattcaggcttcccagaaactatttcctttggaacacagcttctcagatcactttaaagacctgctttcttcttgactttgggcctctcatccttgtcgtctgttgtattcactctcacctacctgtgggttcatccaccatctcatgttgcttcatattccagggctcttttccttgctccagataagtaatcaggtctggcttagagagagcaatacctgttttattaaaaataactaacatgagtcttgctcatattctccacctgccaacttagtaatgtgctcagtaaagagcatataatagaatattctaataaattgtcccaatatactaatttgtaacagaaatgtttaaatatttagaagatattttaattttataggttcttaattttactgcttggtactactgtatcaaaaactggtgatggcaattagattttaaggtgtgagtaacagtattttatgccacaaaacttctgaaattaccactaatctaaagtgaaggacacagatcagctcaggaatgtggaaagttcaggtcaagatgaaacatcttgaggaaattcttttctaaacaaacaaatccccaggattttcttgaaaacagaaatctgaaagcataaatttccagaaaacattctacaaaacagaaatgaagcctgtaatcccagcactctgggaggccaaggcgggcagatcatgaggtcaggagatcgagaccatcctgtctaacacagtgaaaccccgtctctactaaaaataccaaaaaaaaaaaaaaaaaaaaaattagccgggcatggtggtgggcgcctgtagtcccagttactccggaggctgagtcaggagaatggtgtgaacctgggaggcagagcttgcaatgagccaagatctcgccactgcactccagtctgggcaacagagcaagactctgtctcaaaaaaaaaaaaaaaaaaaaagaaaagaagtaaaaccattagtttatattagaaacttagtattaaagttttccttacccaggaaggccaggtttctgtagttctctaacatcacattcctatataaattctgctgtgcagtgtccagacattgccactcctccggagagaattctatggccacatccctaaatgtcaacagtccctgaaaaacacacacaaacacacatatttacaaagtggctatgggcagaatttttcatttgactcaaggtaaaatcagaaagtgactagaactggttctgacttataagagtggctgaaattatccaataaaataattgtcaacacacaaacgttttgtaatgtattctctaactctgagaaaagagagtggcataatacccacaatatcagtgtatatatgatacttgtctagatgataaagtgtaaaattgagggcataaatattaacaagtacatttttgagtgttatatttacataatacagaatgacttgtgtatttttttcaggtgaaaaaggcatagttgttatatatttcagacacaatagacacgttgagttagaaggtaccactcaaaatttttttttttttttgagacagagtctcactctgttgcccaggctggagcacagtggcgcaatctcagctcactgcaagctccgcctcccgggttccgtgattctcctgcctcagcctcccgagtagcagggactacaggtgcccaccaccacgcccggctaattttttgtatttttagtagagacagggtttcactgtgttagccaggatggtctcgatctcctgacctcgtgatcctcccgcctcggcctcccaaagtgctgggattacaggcatgagccaccatgcctggccagtaccactcaaattttaatgtgtatgataaactagacatcttgttaatgcagattattttttcaggagatctgaaataaagtctgaattactgaatttctaaaaagttcactagtaatgccaatgttttgaccccaaaagactattctgtcaaacatccagtaagtggaacagcctgtgtttttttcagtttttctggcctgtaaacaaagatgagagctttcatttaccaaaaaaagatcaatgcaaagaaaacctaaaaaaaaaagggcagctgccagattaaatgtgatgttttatgcacatcacctgcataaagatacttaatgatgaagagaaaaataactctgtagtgaaaaaatctgtaagagagcttattaagcaagtgagttattaataccaattgcactaggacaagtttctatagtatgctgatgcaccatattgcccccactaaagtaaattacagtctcaatttaaccataagaaaatatcagttgcatggaaagttcaaggtacaggtatcttccgtgttctacaatttttaatagtgattttaagtactttctttaacaccctaataagcagctatatcctgataattttttccaaactttctgggtaataaatgccatcctgtttaaatgagcactttcttaatcctgtaatgcacagagataataaaaaaacagaacctcaacattatatgttctccatcttcactaagaatcccaggttttctccatagaaatagattatccacacctttccatgttcaacagccacaaagagaacatttttaatattgcagatcacaaattcatggtgagaattctgcatggcatataagaagccatcatgcagagaaggctctggtagatagaaaagaaatattttcagagatccttgactatcataagcttttttttttttctctttttttttgagacggagttttgctcttgttgttgcccagactggagtggaatggcacgatctcggctcaccacaagctctgcctcccgggttcaagcaattctcctgcctcagcctgccgagtagctgtgattacaggcatgcatcaccacacccagctaattttgtattttttgtagagacagggtttctccatgttggtcacactggtctcaaactgccaacctcaggtgatctgcccgcctcggcctcccaaagtgctgggattacagacgtgagccaccacgcctggcctatcataagcatttttaaaagtagttaagacaaactcattagggagaaaaaatacaggtacagaagtaaaaatttgcaagtactaaacgcgtggcattccacgaggcagagtggacacagctcttgatctgagacatgtttagctgaaaaaaagccattttttctctttctcctcctcctctcaaattctttctcagatgagtttttctggactaattatgtctgcattttgagaatttgcctttaataatttgagcacatgtttacctattaccaccacacccaaaggcagaaggcccaagacacaaaaactctacccatttctgtcctgaataacagaaaagattcagaacaatgagctgctccacagagataaaaatataagtttctcttttttttttgtcctcaggtgccctcccctgctacggacatcagcaatttctgctacagtaatacaaatattggccacactgtcctgtccttaccaaatccaaatagaacaggttcctggaccaccctttagtgcaaaggtggaacttaactctcatgaatgtatcttaaacttctcatacttgattctggcaccttagagtcacaggagacacttaattaaaacaaatagatgctatcttcagaacattaaacagaaactgtgaaaagggcacaagagagttctgtgaattggccatgtgcttctaattagaatcctgagcttataaccacttacctaagcattgccactcaagctttaattagcttataaatcacttggtaaacttggccccactctatgtaatgtgattctgcaggtttggaaatggtccataaatgggtgttctaaacaagtcccctgtcagtgctgatgtcactctctctggtctcattattagcatttgttagaaaaatgaggcacagcacagagtcccttacactcagcactcctgtcacaacacaaatacttctgatacaaatgaagacaaccattctctatcttaaagtatactacttgctggctctttaaagttcacaaagaaaacagaaaacagcaatttctgagtaagtctgcatttggaaaacaacatgtgcacatgtactaatgcaatgtttattaagcaggtactatgtaatcaacaggatgttacagagcactgtgataattcattatttgatttaattctaataacaccctgtgagttgatactaagtgttgaataatcccaaggatttagaataaggatccagcatttttatttcttcttctgtttttgtcactcatttttttaaaaaaatgcatagaataaaatctaaatatagacagatgagagggatacagatagagtgtaatgtaatttagatgaattattatgtttatatttactattttgtgacttgtgaatcaactactgtatctgcaggaacagaaaacaagttgctaaatggaatgtctctgtaaacactggttttaatataaaattattaaattaagaccctataatacatgttatttttccatttatctgctattgggtttcagaaaagtgtgagcaccaactctaaaaaggcaacaggattcattacccaaaactctgatctctactagttagttctgcgaggcaaaactccagggtagggcaagacttaaataaggccttcaaaaagggtgaatctaaacagggctgaagcagggtgtagagttgatgtaaaattctgttctttatgccactggggagtatttttagttccgtttctttttttaaacttagctaaaaaacaaaaacgaaaacagaaacttaaatctcagagtttgtgtaattttaatcttttttagccccactgccctttcaattttatatcacatactaataagcaatttaaacaaatcccttaaggttttctagaataattttttagatgataaataagtattcttagcagggcataaaaaatacaaataataacttttttgtttattaatatatgttcaggtgtagacatcacaagtcacaaaaatataaagaaaacggcccaaataaagcccatatttttgcacacatctatttattgtacccaaccttttgatgcataattaaaccacttatccagttgctagtctagactaaaagttcttgcatggtagggaccatgactgcttcatctatttttctaatgactatatgaattggaagcaattagtttatttgtttgagtctccagacctcctcatcatttttcactcaagtaccagggaactagagaaactctcacctgggtaccaaccaaagacatctcttgtatgaggggaggagcaaacacaggatgactcatttcttttacactaagttagaagcaaaattaaccactctagtcagcctgacacaattctgttctggagattctcaaatgtctcaaagatacctaggtgactgtgagagcatttccagtgaccctgggctgatggtccaataataagccagcaagagagactcaggctgattctaaatagaaaatgaaactaccaaataggcagagacacaattctgcctgcatatttaggtgacagcacacattttacagcgtaactgtgagttgactggaagcctgagagggaaagtcccctctagagtagagcttggttggcaccttatgtgtttatattatgtctggtaattctacacagtgtttgggaaatataatttttattaattctcttcagcaccagagaaaccacagtaatagaacagaaagaaaactgtctcattacacaattaagtctgaatgtcacatgcattacaatccatctgcttaagagattgaaaagaaataaagacggttaccgtaattagttcacaagtagaagaatttacagcgccatgtcataggtagttcatcctaaattcacctggtcattggggaggtcatccatgtatgctaattggttatattcaatgacaaaataagcttttcacatcttcatggcagaaggtagttttgcaacttgaagccaggtgcctgcttaaggtagactttcactcttctacaaaagtggttgaatagggtgctatctttttggctacttgcattttaaagcactggctctctactccctgaggacttgactagtgcactcctgcttcccctcttctggtggccagtgtcctcttttgtttcctaccatctgccactgtggtacagcccacagcacacggctcacagctggcagctcacatcttagatgaacgacaattgccacagcagcactttagtgtcacatcaaagagtgaagtctggccgggtgcggtggctcatgcctgtaatcccagcactttaggaggttgaggtgggcagatcatgaggtcaagagttcaagagcagcctggtcaacatagtgaagccccatctccactaaaaataaaaataaaaaatttgctgggcatggtggtgggcacctgtaatccaagcactcaggaggctgaggaaggagaatcccttgagcccagaaggcggaggttgcagtgagccgagattgcgagattgcaccattgcactctggcctgggcaatggggggaaaatccgtctcaaaaaaaaaaaaaaaaaaaaaaaaaaaaaaaaaaaagagtgaagcttgagctgcagaaggagagcttgcaggcctcccgggtagaatcgcaccttcacaataatgggaatgcgagcattatctaagccacagtttctatttataatggtgacatggaaaatatactgctgggtttccagcatgcatccagatagagatagctctaagagttctcactgtgacagcccatgtctttcacagacattatgggatactaatagggtttctaaaacagatacacaaagcattagaaagaaaaacagctctcattccgagaaagattatattgagagaaaaaaacaagttaaaagcgtcttaagaaaaaactgagattacatataagattgatcaagtcagccagaaaatattcctctaaaaataatttctctctaaatatccaaagtgcatagctactcacagcatgagaaacatgagtgttatgaagaaagggcacattatcagcagaattttagaagatttttttctatctctgctgctctctaatctgctgcccattaaatgtggaatctatatagaaatatatctgacaactaccaccagcactttttgattaaaaaaattaaaacctgtgttaatataatggaatatatgtgagcctgcaacataactaactaaacagctatacagttttggggtggccaaatcacctgcctttatttgtcctgtaatagcagcattccaatttctgaaatgaaagccactaaaattatacttacctataactatccctattggttaaattaataagtatatcagactaatctctactgtaacaatttggtaatacattttctttggatattagatataaatatgtaattatgaataattttaatatactactcataatgtatgtaggattttaaaaaattttctgcaactataattcagttgaaaaactacatttcaaaactatgaatcacaatattaaaacaactatttaaggaattcattcaaagtaaatattgtggctttatattcatactcttgcagaaaatactattgaatgtatatgaatgcaggttgtctacaaacattatacattactatgctaattgtactgaataaatagaaacaaaggtatgacaacacactccacttttcagtttataaactgaactctttttttctttctcttttttttttttttttgagactgagttttgctctcattgcccaggctggagtgcaacggcatgatctcggctcacctcaacctccacctcctggattcaagtgattctcctgcctcaatctcccgagtagctggattacaggcgtgcgccaccatgctcagctaattttgtatttttagtagagacaagattactccatgttggtcaggctggtctataactcccaacctcaggtgatccgcccgacttggcctcccaaagtgctgggattaccagcatgagccaccgcgcccagccataaactgaactcttttttcttttgtagtataaatactttagcctgcaaataatcatcatggataatcaggtttctgtcaaacaacttactcagtatcttttagtctttataattctttattgctaaatttaatcctatttttatgctcaacttttgtgtgcttttagaatgagcaagactgaacaaatctgtgtcaactttaaaagactaaaaattgtaagaacaatcttttgccaaagcaaaaacgaagcaattaatctcgggtcccagataaagacaatcctgagacaaaaaaaaaaaaaaaaaaaatgacaaaaggtttattcagctgttatttgatttatatatatttcaaaaaaagggagataaaatatatacgtaatctaaatgttataagaaaagagattttagtaagatattttcttacttttatgtagactaattaagcctcttatttctaatttatattttcttttacaacagccaggtctctaaacatgttcttgaactcctggacatctaaattttgcacactgtgtgcacatgaaagaatgtttatggaagaaaaaacagaagagagaaaggtgttacataaaattcataggttcagatgaataaagcatgttctcagagacctatgaagagatttagattcagacacaataatagtgggagactacaacatcccacaggcactaatagacagataattgaagaagaaaattaacaaaatatgagaacctaaactcaacacttgaccaaatattcctaataggtatctacagaactcttcatctaaaaataacataacatacattcttctcatcgccacgtggcacatactgaccacacaatcagaaataaaaaaatcctcaggaaattcaaaaatctcaaaattatacaaaccaaacacacagagatattaccactgaccccacaaaaacatcttgaagtctattatgaacacctctgtgcacacaaacaagaaaatctagaaaaaatgaaaaaaagtattaaggaatacatccttccaagaatgaacaaaaaagaaatcaaagccctaaacagatgaacaagaagctcaaaaactgaactgtaataaatagcctaccaaccaaataaagccaaggaccagacattcacaggtggaccagacgtacaaaaaagtgctggtattatttctactaaaactattttaagaaattaagaaaaagtaacttctctccaactcattatataagaacagcattattctgataccaaaacctggcagagataaaacaaaccaataaaattcaggccagtatctttgaacactgatacaaaaatcttcaacaaaatcatgacaaaatccagcagcatatccaaaagctaacccactatgagcaagtagaatttattttgggaatgcaaggttggttcaacatacacaaattaataaatgtgattcatcacataaaaagaactactaaagacagaaaccacaagattacctcagtagatgcagaaaaagcttttggtaaattttaacatctttcatgttaaaaatcctcaacaacctaggcattgaaggtacatgctttaaaataagttatctatgacaaaccctcagccccaatatactgaataaacaaaacctggaagcggatgggtacagtggttcagtcctgtaatttcagcaatttggcaggccaaggcaggtggatcgcctgaggtcaggagtttgagatcaacctggctgacatagcaaaaccccatctctactaaaaatgcaaaaattagccaggtgtggtggcgggtgcctgtaatcccagctactcaagaggccgaggaaggagaatcgcttgaacccagaaggcagaggctgcagttggccaagattgtgcccctgcactccagcatgagagacaaagggagactacctcaaaaagaaaaaaaaaaagcttgaaatattcctccttgaaaactggcaaaaggcaaaagatgccttctcttaacactactattcaacataaaattggaagtcctggtcagagcaatcaggcaaaagataaaaataaaaggcatttggctggatgcagtggctcacacctgtaatcccagcactctgggaggccaaggcgggtggatcacgaggtcaggagttcgagactagcctgaccaacatggtgaaaccctgtctctactaaaaatacaaaaattagccaagcgtggtgtcacgtgcctgtaatttcagctactcacgaggctgagacaggataatcgcttgaacctaggaggcagaggttgcagttagcgagatcgtgccactaccctccagcctgggcgacaaagcaaaactccatctaaaaaaaaattaaaattaaaattaaaggcgtttaaacaggaacagaggaggtcaaactatccctgtttgcagacaacaggtttccacatcaggaaaaccgtagagacttggcagaatagctctttaaacttacaaataacttcagtataatttcaggatacagccctccgcgcccaaccaatcccgggctgcaagggacctggggagctgcagcctggccagggcagtgcactcaggtggcctcgcttccctgcaggtcaccgcccaccacgccggaaccgcgcacagctagagccacttctgaagccacttgagaaaaatttgacagttcctaacgaaaaagattcttcagaaacatataccatctgtgaaaaaagttgccctttcttccgcttgcaaaacagacattctcaaattccaaaatgccagccaaggccccaatttacctgaaagcagccaataacaagaaaggaaagaaatttaaactgagacattctgtctcccgatatcatcagtccccctcttggaggcttttgccataccatccaaatcggcaaagagggccaagcatgacgtctttggagatatttcctttcttcaagggaacaatgagcttttacctggaaactaggagaaagcacacctgggtcagctccccgggcatagtaagttcttccgggccaacagcacctcagactctgtgttcacagaaacaccctcctcagtggtcaaaaataccatctccctcacgatcactggagggtcccaagctctcatgttgctcttattgtcaccggtgaactttaattccaaacaggagtcctttcggccagcaaagttgccaaggcttagctgcgagcccgtcatggaggaaaaaggtcaggagaaaagcagtctgttggagaacgggacagtccaccagggagacacctcatggggctccagcggttccgcatctcagtccagacagggcagggacagccactcctccaacctgtccgaacagtaccccgaatggccagccgaagacatgtttcaccatcccgcgtcatgcaagctcatcaagggaaagactaagtcagaggagtccctctctgatcttacaggttccctcctccccctgcagcttgatattgggccctcacttttggatgaggggctgaatgtcacggaaaaaaataagtaacaggatgcgaacttatttcctttggggtagaaggtacaaaaacaaactaaactaactgcagttgaacagaagggcttctgaagctgtatttgcagttttgtgatgggttttctaaaataatattcttataaagcatttttattttttacctgttatagcttgtttgcaaaaacaatttagaaaaaaaaaatcctgtcttggcaaaacgaggaaatctgtcagtcagaatccattttcagcaggcattggtgatgtttggctcagatattgtttgcagacacacaagaaatctagcttggccaggattggcactagctacaaagggctggacgtgtcacattagaaatttacagaactttacagcactccaacattttctgagcaagaggaagtaaaaacatatttaacacctcagccttttttctagactcttttctatatattgcttgggctcaccgtagagaattctccagtgttaaaacttttctgttttcacatttgaattttacgggttttggagattttcttgtagttcttatatatccctatatattatatctacattgcaaaattttaactgtcagctacatgttggtaagatacaggcaaagtactactgtaactaagttatttttaaagtaaaaatatatttttacatgcctttggaaaaaaataattttaggatacaaaataaatggacaaaaattagtagcatccctgtgaatcaacaacatccaagccaaatgtgatcataaacataatcccattcacaattgctgcaaaaataataaaatatctaagaatacagctaaccaggaaggtgaaagatctctataagaattacaaaacaatgcttaaagaagtcagaaatggcacaaatggaaaacaactttatgctcataaatagaaaaaatcaatatcctaaaagtgatcatactgtcctccaaaatttacagatttaatgctgttcgatatcaaatgaccaaaatatttttaacagaatgaaaaaaaaactgttgtaaaattcatataaaaccaaaaaagagtctgaatagccaaagtaaacataagcaaaacaacaaagctgaaggcattacattacctgttttcaaattatactgcaaagctacagtaaacaaagcaacatggaactggtacagaaacaaactcatagatgaatgtaacagaatagggagcccagaaataatgccacacacctacaaccatctgatcttcaccaaaagtaacaatagaaatgtggaaagaattccctatttaataaatggttgtggaataaccagctagcactatggagaagactaaaactggacccctttattacaccatacacaaaaatcaactcaagattaattaaagactgaaatgttaattttaaaatgataaaaaaccctggaagataaccaaagaaataccattctagacacagaaactggcagagatttcatgatgaaaataccaaaagcaattacaacaaaagtaaaaattgacaaattggacctaattaaactaaaaatctccttcaaagaaaaggaaactatcaacacagtaaacagacaacctacggaataatagaaaatatttgcaaactatgcttctgacaaacgtctaatatccagaatccataaggaacttaaacaagtttacaaggaaaaaatacctcattaaaaagtagacaagaaacatgaaaaagatgcttttcgaaagaagacaaacatttggctaacaagcatgcaataaaatgttcatcaataatcattagagaaatgccaagaaaaaccatgagataccatccacaccagtgagaacagctattaaaatgtcaaaaaatagatactgtcaaggtttcagagaaaagggaatacttatacattgctgttaacagtgtacattaattcaaccattgtaaaaagcggtgtggcaattcctcacagaactaaaaacagaattaccatttcaccaagcaacctcatcactgggtatatacccaaagaaatacaaattattctctcataaagacacatgcacaagggtgtttcactgcagcactattcacaatagcaaagacatggaatcaacttgaatgcctatcaatggtagactgaataaagaaaatatggtatgatcaggcacaatggctcatgcctgtaatcccagcactttgagaggccaaggcaggtggactgcctgagctcaggagtttgagaccagcctgagcaatatgggaaaatcccatctataaaaatgcatctctaaaaaaaatacaataagaaaaattagttaggcatggtggcacacacctgtggccccagctacttggaaggctgaggaacaagagtattgcttggcccaccacgatggctcatgcctgtaatcccagaactttgggaggccaaggtgggtggatcacctgaggtcaggagttcaagactagcctggccaacatggtaaaaccccatctcttctaaaaatacaaaaattagtcgggcatggtggtggtgggcatctgtactcccagctactcaggaggctgagacaggataattgcttaaacccgggaggcagaggttgcagtgagctgagatggcactattgcacttcattctagacaacaagagtgagactgtctcaaaaaaaaaaaaaaaaaaaaaaggccaggcacagtggctcatgcctgtaatcccagcactttgggaggcagaggtgggcagatcacttaaggtcaggagttccagaccagcctggtcaacatggtgaaaccccgtctctactaaaactacaaaaattagcagggcgtggtggcgcacacctgtaatcacagctactcaggaggctgaggcaggagaattgctggaacccgagaggcggaggttgcagtgagccaagattatgtcaccgtacttcagcctgggcaacagagtgagaccctgtctctaaaataaaataaaatatataataaaaaaatatgatacataaacatcatggaataccgtgtggtcataaaaaacaaacagaaaacaataaccaaaaacattgtttttgtataattcatataaaaccaaattgtaaaattcatataaaaccacaacagaggctgaatagccaaagtaaacataagcaaaacaacaaaactgaaggcattacattacctgttttcaaattatactacagagctacagtaaacaaagtaacatggaactggtacagaaaaaaacaagattatgccctttatagcaacatgaagctggagaccattattcttggaaaaccaatgcggaggccaaatgcagtggctcacgcctgtaatcccagcactttgggaggccaaggcaggcaaatcacctgaggtcaggagttggagaccagcctggccattatggtgaaacgccatctctactaaaaaatacaaaaattagccaggcatggtggtgggcacctgtaatcccaagctacttgggaggctggggatggagaattgcttgaacccaggaggtggaggttgcagtgaccaaagatcacgccattgcactccagcctggtgacaagagtgaaaccatcttttaaaaaaaaagaaagaaagaaaacaaatgcgtaaatggaaaaccaaatgcatgttatttataagtaagagctaaataataaaaacatgaacacagaggggaacaacagacactgacgcctagttgagggtggagggtggcaggagaaacagggtcagaaaaaatacctctttggtgctatacttagtaccttagttacaaaataatctatacacaaaaccaccatgacacaattttagctgtataacaaacctgcatgtgtacccctaaaccaaaaatagaagtttaaaaaaaaaaactccctgggtagggaagagtacactccaggtagaaagactggtttgtgctacagatagtggcccaggtggggctgtactctgatttatttctgggtccatgcaggcagatgagtttataaacaggtggtccagaaccccaggctggtggacaaaacagcctgctgctgcagattcagtgtctggaggtgggaatatgccagaagacttggagatacttctgtaagtttttggcaaaaaaaaaaaaaaaacactaggatcaaaaatgctgtagtaaaattcctgagtgtggttccctgtcctgggagaggtgtggacacattaatgtctagtgggtatgttagtgagtgggtgaaaatcttgtggtggtggctgtggcaaaaggggatctgccatcagagctcctttcctctaagttttaggtcctctgtcaccctggaaggggagctggaatcacagaacaagggacagtgtgacagcctgtgtagagtgcacagcctctcattcctggacacccagaggtttatactaatccaggagtctgtggtatctttcttctggcaccaaatctgtagagtttgctaaacaccaagcaattctccaacaccaacttattatctaaaacttcaattctgacaccacccagagtcagcacagaccttgattcagggctcagtctcacaacattgtcctcactgcagatgccagtcacaaactctataagcccatctatgcttctgagatactgtttagaaactggggactcccataatgttactgaaatttactaatttgttagagctactcacagaactcagcggaacactgtagtcatatttaccattttcacataaaagatacaacccgggacaggcgcgccagctcacttctgtaattccaccacttcgggaggctgagacaggcgaatcacctgagatcaggagttcaagaccagcctgaccaacatggagaaactctgtctctagtaaaaatgcaaaattagccaggcatggtagcacatgcctgtaatctcagctacttgggaggtggaggcaggagaattgcttgaacccgggagacggaggttgtggtgagccgagattgtgccattacactccagcctgggcaattagagtaaaactccgtctcagaaaagaaaaaggtacaaccccaacaaagtcatgtgaaaaaaatgtataagaccaagaataaaggtggaaaaagatgaagcacatagatgataaacagctgtgattaataaaattctctatcttttgtgttctccaagaacactttatggtgggggggcggaaaaacccttttcattatgatgcccaccaccaccacgcccgactaatttttgtatttttagtagagacggggtttcaccatgttggccaggctggtcttgaactcctgacctcaagggatccacccaccttggcctcccaaagttctgggattacaggcatgagccatcgtggtgggccaagcaatactcttgttcctcagctgtccaagtagctctgaccacaggcgtgtgccaccatgcctaatttttcttattgtatttttttttagagatgcatttttatagatgggattttcccatattgctcaggctggtctcaaactcctgagctcaggcaatccacctgccttggcctctcaaagtgctgggattacaggcatgagccattgtgcctgatcataccatattttctttattcagtctaccattgataggcattcaagttgattccatgtctttgctattgtgaatagtgctgcagtgaacacccttgtgcatgtgtctttatgagagaataatttgtatttctttgggtatatacccagtgatggggttgcttggtgaaatggtaattgtttttagttctgtgagaaattgccacactgctttttacaatggttgaattaatgtacactgttaacagcaatgtataagtattcccttttctctgaaaccttgacagtatctatttttttgctctcttttcttacctatcacacagccagaaaaacgctttgtgcattttctcctcttcctcattaaaaatcagctgactttgtcttcagtggtaaacataaaatacttcttaatctaactgaacttaagtttattttcttcccacaggctcctgaactttgagctaccctcagtctgagccaccatacaaccccattttatgtttatcctaagaacatgctgacttcagggtaaaacattctcaaaatctgattttattaccctctgtttaaacattcccctcctacctccttactaatcttgtttgcttttccctaggaaaaaaagccactgtctgcctcatctttgcaatctttaaaaatcttatagtcactacttcctcctgttgcaatactcctttgaaattcaagtttttacatacatctaacttttattttaaaaagtctagaaactgcctcaaaacaataacttcatcttcagtaagaccctcccaatacccttttatattaatcttaactgcatctgcgtgtgggttgccagctttccagggctctgtagattgtctcagtataggggcttcttccatagctgaggtgagcaagctgggacatctgcaggggaggctccccagaaggaactaagtgggtctttaaaaacctccttttgcaggctcaagcctgcaaaaggcttagcttggagtcactgggtttaagctttaatttctatgtcagagttattaacttggcttttgaaactataactaggtggtagaataattcagcaaaattatgcaaacacagtgttcatacaagggaagaaaagtttaaggtgtttacatcttatacctcagtaagaaaagcaaaagtatttattcctttcagacaataaatatattatgttattatttgtatcaaaaatcacgtagcaaacaattagtctgccgggcacagtggctcatgcctgtaattccagcacgttgggaggctgaggtgggtggatcacctgaggtcaggagttcgagaccagcctggccaacatggtgaaaccccgcctctactaaaaatacacaaattagccgggcgttgtggcaagcgcctgtaatcccagctatttgggaggctgaggcaggagaatcacctgaacccaaaaggcagaggttgcagtgagttgagattgcactactgcactccagcctgggtgacaagagtgaaactccatctcaaaaaaaaaaaaaaaaagaaaaaaaaatagtcacatgggaacacttctaggaggtatcaagtttcatcacataaaatttagcattaaactcaaaaatcaaaataccaggatatagaaccaggcacgacagctcacatctgtaatcccagcactttgggaagctaaggtggaaaaatcatgagggcaggaatttgagagcatcctgggccacatggtgaaaccccatctctactaaaaatacaaaaattagctgggagtggtggtgcacgtctgtaatcccagctactggggagctgagacaggagaattccttgaatgtttgaatccaggaggcagaggttgcagtgagctgagatcacaccattgcataccagcctgggcgacagagcaagatttcgactcataaataagacaaaaaaaaacccttaggtcaaaataagtgaacaaagcttttcaagatacagatatgtcttcctcatgtgtcaagtcaggccattcaattacttgagagattgtcccatcccatcctgctcacttaagtgctcaataaccccctctcaggagactctgaactatgccccagtgagtgcctcaggcacattatactctgcaagttcttacgccatctaactggggtcagttttttggttttttgggtttttttttgttttttgtcttttggagtgctgggtattttttttctagaaatttttttactatttttcttgcactatttttctgccccctaaaggaatccaggaggcagaaattatttgttttctcctcaatactagtatctgattggctggccagcaatgtgtctccaagaaatgaaagctgaattgggtgaaggcaatattaatgtctcaaggaattaactttaaaaaaaagtgcaccaggaaatgcctctcagcctcagggcatccacgtccacacttgagaagctaaactcaatacctcaggttgtcctatgagagaatatgacccagaagctgatattcactagacactctagcacacatagccatggtgggtatcttggtttatccccatacagtactgaaatctaggtccaagaaaaaactgaagggtgactgaagacacatcaccctatacagtttccaaaaggaaaacctgacccaaaaacattctggtaagatagctgcgtctagggaaaatagacgaaaaaaacgcacagagatattttaccatacagtgtcaggagattattctttgctttcttctcacagggagtatttaccaaaaaaaacaaatctttttaaatgtgccatcaaatgctttgtcaaaaaaaaaattaattggccagatgcggtggctcacgtctgtaatcccagctctttgggaggccgaagtgggcagaccagctgaggccaggagttcgagaccagcctggccaacatagtgaaaccctgtctgtactaaaaatacaaaaattagccagacgtggtcgtgggcacctgtaagtccagctacttgggagactgagagaggagaatcatttgagcccagtaggcggaggttgtagtgagcctagtgcgtcactgcactccagcctgggtgacagagcaaggctctgtctcaaaaattaaaaataaaaatgattaaaatcggtatcaaaatgtacactacaggacaaatagttgataaagtgaattagggaggggaaattggcatttgggaatgtcagacgaaactggaaatttagtattttactgcaagccagagttaggctggaggaacaggggatgaggggtggacttgaggccctgcttgagacacatgtaaaaaattcagggaaaaatcgtccccttttgagtgtgagaaaaattaagtggcaggcaattagattgaggtggctctagtcctcggatttctacttctaaaaataaaaatctaaactcaagagcattttttggtaaattactacattggcagaagcaaaatttaggcttaagcaactataaactgccaattaagctctgattacataagaaggatatttccacctagattgtaaaaattaagaaactaggccaggtgcggtggttcacgcctgtaattccagcactttcggaggccaaggtgggtggatcacctaaggtcaggagttccagaccagcctggccaacaaggtgaaaccccgtctctccgaaaaataaaaaaattggcctggtgtggtggcaggcgcctgtaatcccagctactagggctgaggcaggagaatcgcttgaacccggaaggcagaggttgcggtgagccgagatcacgccactgcactccagcccgcgcgagagagcaaaactccttttcaaaaaacaaaacaaaacaaaacctacataactgtacctagcaaattactgaatttggttttctttaccatgaaccttataaaaatatctccttcaaggcctttcatagaccacaaattacaaaccatagctgggtgctctacaatgtttgaatcactctttgattaaattatttaatcttttcgcggtgacgcccataaatttttaatagaaaaaaagaggccctgggaaccccacggactaaagtgcttcctattcatgagccagcacctccagtcaggattctcccctgacgaccctcccgtgatccctgcacaatctgggagagacgcggcgctgcgggagcagagctgcccagagagggctccaggccaggacacagtcactgggcagggaagagacaggacgcccggagcccgcctgtcaacgcagccgccatcttatcgctgaaggggactgaggccgagctgggcaaggagaacccgggcacggattgtggagctgactgaaggaaggcctgaggctcgccacagccgcatcccaccggtttcaacgagccccgttccctctctcgggacgtcgcacctggcagtctcaccatttctaggcttccaggggttcctggcatcttagctgtggctctccaatacctgcaggtcacagggccacacaggctgggcctcctggagcagaggacacagagcagtgaagtcgagacctggaaactccggcggcagcgagagacaaaggcccagccacatcccggaagccgccctgtccgctccagctttgtgcctgattggacagttcccagcccagcgtccctgattagataacgtttaaggccccgccttctcaggccctgagtgacagaagatgtgatcagacactgggctgaatgaagaaagagtgacagcgtaggctgcagccttttcaggcagggcttcctcagctcagccaggcccacctcagagcatgggaaaatcctctctcttctttgctctctttcaatgtattcaaaatgtgaacaaaaatatttgatgtatattaataatacataaaatttttgttccagagaaaatcaacttttactttattgtgtattatcaataataaagctaatttgataaaacattgtaagtctctcagccgggcgccgtggctcacacctgtaatcccaacactttgggaggccgaggcaggtggatctcctgaggtcaggagtccgagaccagtctggctaacatggtgaaaccccatctctactaaaaatacaaaattattgagcatggtggtgcgtgcctgtaatcccaactactcgggaggctgaggcaggagaattgctagaacccgggaggccaaggttgcagtaagcctagatcgcgccaatacattccagactgaacaataagagtgaaattccatttcaaaaaaatgaaaaataaaatataaaaattagctgagcatggtggcacacgtctgtaatcccagctactccggaggctgaggcaggagaatcgcctgaacccgggaggcggaggttgtagtgagttgagatcatgccactgcaccccagcaaaaaataaaaataaaaatacattaaaatttttttgacctctctagatttttatacatattttatgatctcttataattttttaattttttttttttgagactgagtcttgctctgtggcccaggctgaagtccagcggcacgatctcggctcactgcaacctctgcctttcaggtccaagggattctcctccctcagcctctggagtagctgggatgacaggtgcaccaccacacctgactaattttttgtatttttagtagagatgcggtttcaccatgttggccaggctggtctcgaactcctggcctcaggtgatccacctgccttagcctcccaaagtagtgggattacatgggtaagccatgatgccggtccattgtttaactttttatatttcattttaatctacattatttttactttttcaatttgaaggaacctttaagtaatttcaaagcagacaaatgtttctaactttcttcatcaaaagcatattttgcttttgtttatactctctctattttcttttaatttccaagagagaagcttgttctgtcacccaggctgaagtgcagtggcatgatttcagctcactgcaacctccacctcccagattcaagcgattctccagcctcagcttctggagtagctgggattacaggcgtgcgcgatcatgcccggtttatttccttatttgaagtagtgactggaatttgccatgttgctcaggctggtctcgatctcctaagctcaaaatgatctgcctatctcggcctcctaaagtgttgggattacaaggcgtgagccacaacacctggccttaaacattctctttgaagaattagtttttttacatctagtggtcttttattaattacattaacccttaacaaactaatttttagtgaaatccctaggaagtaattttgaactgttttatattaatatttgtagataaaaaacatttatatattttaatgttaaatacagtgagttctaaattgctcttcaaagaatcagtatgtcagtatattcagctccctgttcttcattctccattttaaagtttaacttctttgttgtttttgtctccagttttagtaaacaaccttcccgccagttctaatcagtagtttacatctgtacccctggtcacctgctccatcctgagtcacccctggtcacctgctctgacctgagtcaccttggtcacctgttccataacagtagttcccacccaaactgctcaccccaccactctggcttgtactcctcctctctttaaaatagccaatgggaattagcttagactgtgcagtccaaccctagccaataggggaatgacacagcagtaggggctacctgcatcagggctaagaactcctttccctcccttgttcaggtgtgctcttgccattgctccattcgcaagatgcacccttctataaaagtaaatattgtcttgctgagaaaatttacattcaagtactatttcctttgcggcatcaaaaatttgcttctaacatttaataaaagattttttttttaattttctgtaaacgaatctaaatatagttagcttttttataacatattaaagattctgggctgggtgcagtggctcacgcctgtaatcccagcactttgggagactgaggtgggtggatcatgaggtcaggaattcaagaccagcctggcaaatatggtgaaaccctgtctctgctaaaaaatacaaaaattagacaggcatggtggcgtgctcctgtagtctgagctactcaggaggctgaggcaggagaatcacttgaacccagtaagcagaggttgcagtgggccgagatcgcaccactgcactccagcctgctgacagagtgagactccgtctcaaaaaataaaaagtaaaataaaataaaaaaattatagtcaggcatgttggctcatgcttataatcccagcactttgggggagcaagtaatgaagactgtttaagcccaggaatttgagaccagcctgggcaacatggcaaaaacacatgtctaaaaaaaatttaaaaattaactgagcatggtagcctgcacatttagtaccagctattcaggaggctgagggaggaaaattgcatgagcccagaagtcgaggctgcagtgagccctcattgagccacttcactctattctgggtgacagagaccttttctaaacaaaacaaaacaaaacagccaaaacatagaaagttaaacttacggggttttgtgtttttttgtttttgtttgtaattattattacttccaaagtttttaaggtacaggtgatgtttggtcacatggataagttcttttgtaatcatttctaagatttaggtgcacccatctcccaagcagtgtgcactgtacccaatatgtagtcttttatccctcacccctctctcccgccctttctgctgagtacccagagtccattacataattcttatgccttcgcattctcatagcttagttcccacttataagtgagaacatacaatgcttggttttttattgctgagttacttagaataatggtctccaactaaatcgagattgctgcaaatgctattattttattcctcgttagggctgagtagtatgcattggtatatatatgccacattttctttttccactcattagctgatgggcattaggctgcttccatatttttgcaattgcaaattgtgctgctataaacatgtgtgtgcaagtgtcttacacatataatttctttttcttcatgtagatacacagtagtagaattgcttaatcaaatggtagctttacttttatttaatgaatctccatactgtttttcatagtggttgtactagtttacatacccaccagcagtgaaaaagtattcttttttcaccacagccacgccaacatgtattattttttgatgttttaatcatggccggttttgcaggaatatattggtttggttcagaaaggcgggacaactcaaagcgggcggcttccaggtaaatttaaatattttgtggttgacaagtggtggaatctgaagacctgggatcaatgaaagggaaggtttaggttaaggtaaaggattgtggagaccaagttttattgtacagaggaatctctcagataggtgaattaaaagagagagcagtttgtaaaatgtttattagacctaaacgggtgcctggctcttagttgattatctcctggatctgcaaagaaaaaaaggaaaacaaaaggggaaggggattctctacaaggcctaggcatgagaggagagtcacatcaagttaagtactgggccacgtgacatatcacaatccccatgtggacacattccagtaagacaacacctaggtgctgggcccaggaacatatgactgtgtcttttataggcaaacacagggtagaagaggggaggggataacaatcaaacatctgatgggccaagagatatgtcacaatgccccctgtgggcagggtccaggctggagacacatatcaccttggcgttgggcccatgaatatgtgacagtgccttctgagggcaggcccaaggcaaaagagtaacatcattatgcggctgggcccagtggtttgttacaatctctgctgcagttgaaacctagaaagaagagaagaatcaggccaggtgcagtggctcatgcctgtaattccagtactttgggaggccgaggcaggaggatcacctgaggttagaagttcgaaaccagcctagccaacatggcgaaaccctgtctctactataaatacaaaaattagccgggcgtggtggcacatgcctttaatcccagctacttgggaggccaagtcaggacaatcgcttcaacctaggaggcagaggctgtagtgagctgaaatcatgccgctgcactccagcctgggcaacagagtgagactccatctcaaaaaaaaaaaaaaaaaaaggaaagaaaagaaaagaagagttacaccagctaggtgtattgggcctagcaatatgtcacaagttgttttgtgagaaggaactaagcagtaaaagggaatcatattacctgggtgatgagcatagagatatgtgacaatgactcctgcaggcagaacccaaacaagagagtgacattacctgggttttagacccagcaatatgtcacagtgacccatgtgggcaaagcagaggcaggagagtaacataacctagtggggagggcagcaatatttcacaattttcattgtggacggcaccaaagcaggagagaaaactcccatcacttgggtgcaaggcccagtgatatgtcacgatgccccatataaaaacacagaggcaagaaaatagagtcacatcacctagtttctggtacagtgatatgtcacgattccatctatgggttaaatccaggcaggagagtaaactcactcaggttctacacagaggcatgtgtcacaatcacaagtgcaggaagatccaagatgagattaacaatcctgtacatattccgcttctgtgtgcagcagcaaggcagaagaggagactcacattacctgggtgtaaggctctgagatatgttacaatgtctttttcgagtagcaccaaggcagaagaatagagttacatcacttaggcactgggtccagcagtgtggcacaatcctatttgtgggccgggccaattctgaagaatcacattactcaggtgctgggcagaagtgtgcgtcaaaatcacacctgaaggaaagaccagagatgagattaacaatcctgtacgtaccctaattcttggtatgagagtcaacacctcctgtatgttgggtctaagtacatagtcacaatttttagaatgagctgaatcactgaatgagagactcaatccctcttactggctgtgtcaccttagtggaatcagacaaacaggtgtgttcaatcttggtctgaaagtcaccaacttacctttggactggattcacttatgagtaaattttacaacttgcaactgtctctgcatatgagattcagaatttccagtggaccgttcttgtgaaaagatgataatctttactgtcgactgggtatacaggaatgtcaaaacagctgtacactgagtctagctagaatactctctgtaccaaccgaggatttataaggtatgcatgagagtcacaatcttttgtgactaggaaacatttgtgctggtatgggcccatgatcatacctgtggctctatgctcagatgagagagtcaacatctctgtaatggctgggtccagatatgagagttgacacctgcctataagctaggctaatgagtcaccacctcatgttgcctgatgttcacatatgacagtcacaattttaactctgcactgcatccacatgtaaaatttaagacctcaccagtaggctctgtccatggatgagggtgacaatcttaacaattggcaaactgtgcaaatataaaacaatctcgttttctggaccctgttatgacactttctggagcactggagggctttatacaatatgggagagactgtaattttctttaaccttcctacaaaggggagagccagaatcttacccattttcctaagcccacatatgagagatagtatgtctcctattggctgatttcagatatgagagtcaacattgcaccaatgatctgaacaaagatatatgtcacaatctcccctgtggatagggagagagcaggagacttatatcatctgtgtaataggccaggtatatgtcacaatcttctctgagaacaggcacaaggcagaagagttaaaaactgggtgcttaggcatataaattttctcctgaaatcagggcacagagagtagagtcacattacctgggtgctgagaccagagatatgtcacaatgctttctatgagcaaagctcaggcaggagaaacacatcacttgatttctgtgccagaagatgtgtcacaatctctcatatgaggaaagccttggtagaaaaggagagtcacatcaaatagttgatgctcttaaagatatgtcacaatgctctgttgtcagggtccatacggaagactcatgccaccttgttgctgggcccagcaatatgtcacaatgccttttcaggtacaggccaaggcagaacagtaatgtcacattggcgtagagccccacaatatgtctcagtcttccttgctagcagaacctatgatggaagaagaatcacacttgtttggtactgagccacatgatatgtcgcaactccccctgtgagcagggaccaggcaggagaagaaagtcacatcatgtgggtgaggtgtgaaaatatatgtcacaatgctccttgtgggtagtagagttgcattaccagggtgtatgtcccagcaatatgtcacaattgcttatgtggtcaggtgacaggtaggaaagtcaaaaaacctggtgtggggcccagagatatgtgacaatgcattctgtgggcagtgccaaggcaaaggagactcacatcacctaagtgcaaggcccagcgatatgtcacaatgccccctgtgagcagcaccaatgcagaaaaagagagtcagttctgggttcagctatatgtcactattccatctgtaggcaagacagtcagatcactcaggtgctgggcagagaaatatgttccaagtaaacctgtgagaaggtgcagggatcaaattaacaatcccacacatgttccggttttaggtataggaggttaacccttcctatatgttgtgtctaagaacaggagttacaatctcaacagtagacaaaatttgtacctaacagcccatactcctgctgtggacttagtctaattagtgaagtcacagcctcataggcgtgctgattcttgctctgaatgtcaccaactcacctgtggactggatccaaatatgagagtcaagttttccacctttgacttcctctatgtgtgagattcagaactcacaatgatgatgtgtactgtttgatgggtgttcatacaatggtaaaagtctcctctgtgtgctgggtcttgttagtacactttttttcttttttttttttttgagatggagtctcacaatgtcgcctgggctggagtgcagtggtgcgaccttggctcactgcaacttctgcttcccgagttcaagcgattctcctgcctcagcccccggagtagctgaaattacaggcgcctgtgagggatcagtcagaatggtaagaaaaactatagggaaaggacgcaaaccttctgaaagttcggaaggttctgcaaagacccaggggagaatagctgaaggcagctgctttataaccctgaggcagagggccaggagtaggtacagtggagtgtaggggaatttatcttaaacaggcttgtttacttatattgaccaggaactgacctttgatcatccacgggagtgacgatccctgaaaggagaacaataaatgttaattacctgcaggttgtgtttgctccaggtttttggcattgtgcctgcactgaaagaaagcaagcagctccagcttcttggggcagctctctggccactagaggcaggccattatctagctgctgttacactgcatacctgtgtctgagtactaattctatccatcagccagggcctgcaggaaaggcccagtaggcggccacatccatgctcagctgattttttgcaattttagtagaggcaggttttcaccatgttggccaggcttgtctcaaactcctgactcatgatctacctgcctcagcctcccaaagtgctgggataacaggcatgagccatggcgcccagctagtacactctctatactactcaaaggctttatccagtataaataagagtcacaatttactctaaagtcatgtttgtaagcacccatgaccatacttgtggctctaagtccaggtattagagccaacatctctccagttggtagggtttatatagtagagtcctcatctgctatgttctgagtttagaagtgtgtcaccatctcaactgtggccggaggctcatatatgacagtcacaattccaactctggacagtgtttgcatttgagattcaagacctcagcaatgggctcttttcatgtgtaagggtgataatcctaatggttggtgaggtgtgcatataagaaacaatctcacctttgtgctgtgtgccttgggataacactctttgtaacactcgagggcattatatgatatgttggagggtggcaattctgtatgaccttcataaaaagagaagaccaagaatgtgactcatttttctaagtcgagctatgagagacagtatttcttctaatagctgactagaggtatgagagtcatcattacacttataagctgactacagtacatgcctccatttaacctgtaggtagagagttagcaggagagtcacatcacctgggatttcagccaagggtatctcacaatcttccctgagggaaagaaccaagcaggaatatcacatcacctgggtgctcatccagggatatgttacagttctctcctgaaagcacagcataggcaacagtcacaacacctaagtgctgagctcagcattatgtcacaatgctccctgggggcaagacagaggcaggagagccacatcacctggtgtctgcttccagggagaagtcgcaatctttcctgtgcagggcaggttgcaggcaagaagtgtcacatcttttaggtcatggatgcagatatatgtcacaaggtcactgtgggcacagcccaggcaggagcatgcaatctcataggtagtgggcctagtaatatttacaataccaaaaatatgtgaggccgaggaaaaacaggagaattgcaacacctagttgctgggtctagtgatatgccacaatcctcccttgccctctgtgaaaatgccctctgtgaaataagaatagactcacattacctaaatgctgggtccagcaatgaagcacaatcccatctgtacgctgggtccaggcaggagagtcaaattactcaggtgctaaaaaaaggtgtatgtcacaaacacagctgaattaaggttgaggtatgagattaacaatttcacacattttttagttctagctgagacataattccctctgtatcttgggtgtaagtacctgagtgacaatctcaatgatagtctgaatttgcatatgagaacctcaatccctcctgcaaattgtgtcattttagtgaagtcaccgactcacaggtgtgctgaatcttggtgtcagagacactaacatctctatggatcgaattcacataatgagattcaattttccaacttttgactgcatctgcataagagcttcagaacctcaacagtgagctgtgtttatgtggaaggatgacagtctttactgttggcaggctatgcatatgagtgtcacaacctcctctgtgtgctgagttctgttaggacattctctgtacctcttgacaactttacacagtatgtgacagagtgttctttatgaccttcatacaaagaggagacccaagacattactcattttcctgaccctggctatgagagatagtgtatctgctattggttttttcgaagtttgaaaatcattattgcacctttaagtttgaacaagatatgcatcacaatcccaccaatgaaaagggactgactagtagactcacagcacctgcattttggggcagtgatatgtcagaatctcctctgagggcagggacagggcagaagtgtcacaccacctgggtgctcaattagggatacgttacagtctcctcctgaaagcagaatacagtcagcagtcacatcacctggatgctaggcccagtgatatgttacaatgatctgtgggcaaggaccaggaaggaaaaacagatcacctgattcctgagaacagtgattcatcacaatctttccagtggtgagggtgcaggcagaaaaggggggttaaatctcaaagataatgggtacaaagatatgtcacaaggccacttatgtgctgggctcaggcagaagcctcccatctcatgtctgttgaactcaatgatacatcactatatccaaaatatgccagaaataagaaaaataaaagggtcacataacctaggtgatggaaaggagacatgtcataatacttccgtgggcagttcccatgtcataaagttgtatcacctaagtgctgaatccaggcatatgtcacaacacacaatgcatttagggcttaggcagaagaggagagtcataacacataggtggtgagtccagcaacacatcacaaatccctgcttgggcaaagccatagaaaagagtcgcatcacctatgtactgggctcagtaatgtgtcacgctacccccttaggaggagggcccatgcaagagagtcacatcacctatgtaacgggttcagcaatatgtcacagtacccattctggcgcaaaagagtcacatcttctaaattatgggcaacagagccaggctccatctcaaaaaaaataaagagtcacatcacctaataagcggtctcagagataagacaccatggccctcatgggtagggctcaggaagaagtgtgaagtcacataacctttgagctgggcccagctatgtgtcaaaattacttcagtgggcagggcccagacctaagaaaagagtcatatcatgtaggtacttggccaagcaatatgccacaatccccactgtggacaggtcccaggagaagagtcacacaatctcagcaattggcccagatatatcttacagtgacttttgggagccagcagaagaatctatcacctgtatgctaaactcagcaataagtcactctctctactatgggcaaggcccacgcagaaaaggagagtcaaatcaccttggtgctgggcccaaagatatgtcacaatctctttttgggcaatgtccaggtaagagagtagagtcacataaaatagtcaaaaagggccaagcgaaatggctcacccctataatcccagcacattgggaggctgagtcgggcagatcggctgaggtcaggggtttgagaccagtctggccaacatggtgatacctcgtctctactaaaaatacaaaaattagccaggcgtggtggtgcacacctgtaacctcagctattcaggaggctgaggcaggagaatcacttgaacccaggaggcaaaggttgaagtgagttgagatcacaccactgcactccagcctgggtgacagagtgagactctgtctcaaaaataaaattaaaataaataacataaaataaataaaatagtcaaagggccccagatatgttacaatacaccttgtaagcagggtccaggcaggagactcatatcacatttgttctgggcccagcaatatatcaccataccttctgagggcagtgccatgacaaaagagtaatgtcaccttagtattaggcctagtgacatttcacaatatcccctgcaggcaaaacacaggaagaggagaaaagtcacattagctaggtgctgagcccagtgatatgtcacaatcccttctgtgagcaggggccaggcaggagaagagagtcacattacctgtgtgatgggtgcagggttatatcacaatgtccgctgtaggcaggaccgaggcagtagagttacatcacctgggtgttggacccagcaatatgtcacaatggcctacatgggtagggcacaggcaggagactcacataacctatgtgtggggcccagcaatatgacacaatgccccctgtgaaagagccaggctggagagaagattcacaccatctgggtacaagacccagtgatatgtcacaatgcccactgtgggaagtgccaaagcagtagaacagttacatcactttggtgctgggtccagtgatatgtcacaatcccttctgtaagctgggcaggagcatcaactcactctggtgtcgggtaaagtcatatgtcataattacactatcaaaaatgttcagggatgagattatacatctggactgggaagaatcaacacatcaaaaatatgaccaggccgggcacagtggctcccgcctgtaatcccagcactttgggaggccgaggcgggcggatcaccggaggtcgggagtttagaccagcctgaccaacatggaaaaaccccgtctctgctaaaaatacaaaattagccagtgtgctggcacatgcctataatcccagctactcgggaggctgaggcaggagatttgcttgaatccaggaagcggagattgtggtgagccgagattgcgccattgcgctctagcctgggcaatgagagtgaaactccatctcaaaaaaaaaaaaaaaaaaaaaaaaaaatgaccaaaccaggcacagtggctcatgcctgtaatcccagcagtttgggaggccaaggcgggagaatatctggagcctaggattttgagactatcctgggggccacatggtgagacaacacctatattaaaaaataataattacagttaaaaaaatatatatatatatatgaccagcgcctgaaaaacatagcaagaacacatctctactgaaaaaaaaaaaaaaacatagatgattgattggtagacagagagacacacagatagacagatagatagatatagatagaaccagtcatggtggctcacgcctgtaagctcagtaatttgagaggtctaggccagcacatcgtctggctgcaggagtttgagatcagcctggaaaacatgatgggaccctatctctacaaaaataaaaagtaaaatatacaaaataaagcgccagtgtggtggcgcatgcctttagtcccagctactgggaagtggggtgtctgagacgggaggatcacctgagcccagggaggtcgaggctgcagtgagctgtgatcatgcacctgcactttagcctgggtgaaagaaatctaaaacaacagcaacttcagtgtacgggaaggagcaagagagacaaagagaaaaaaagaaaaaaacaacagaactcaatgtactgtgaaaacaaactcaaagtggtgctaaaaaaaaaaaaggaaaagaaaaagaaacagaaagatcctgagagccccagctatttgggaggccaaaataagaggatcaactggatgagcctaggaaggtaaagagtgcagtgagccatcattgaactcctctgctggaccgaagctgtactgtcccggtgagagccatctggtccaccgtaaacatttccagctggcaaccaagtcctacgctcgtggcccacatcctgtacacctggcagccagaaagagaagccagctggtggtggaggcagaagcagaagcccactgtgtctaccgtacaggccacatgtggcactcgcggcctgaagctgtccctgttggaaccttatttcccccaaggcggcccacctccgcagccagcctctaagtctgccgaccttccttcctaagctttgaatccctggtccacccaaacgagaggccagcagccacaactactggccacagctcgccacccacatctggtcacccggtggccagaccgagaagccaacgtgtccaccctgcaggccatgtgtggcgctcgcccctgaaaacgtccctctggcgtctaagtctgtgagcttcccatcactccctgggtgacagagtgagactccatctcggaaaaaaaaaaaaaaaaaaaaaaaagatgatggggaagaagggagggagggagggagggaggaagagaggaaaaggaagaatgaaaaggaaaaacaagaagaaaataaaagaggacagagcatggtggctcaaacctgtaatctcaacactttgggaagctgaaatgggagaattgcttgagcacagaattttgacaccagccctgggaacacaaagcagaaggaaaggaggaaggagagaagaaagaaaggtaggaaggaaggaaaaataaaaccaaaaaagttcagggaacatcactcgcactgatgatcaaaggtcagttcctggtcaataaaagtaaacaagcctgtttaagataaattcccctatactctgttgtacctactccttgccctctgcctcagggttataaagcagctgccttcagctattctcccaggaggctttgcaaaaccttctgactagaaatacaaaaattaggtgggtgttgatgagcctgcttgtagtcccaactactagggaggctgtggcaggagaatggcttgaatctgagagactgaggttgcagtgagccgagatcatgccactgtactacagtgtgagtaacagaatgagaccctggctcaaaaaaaaaaaaaaataaaataaaaataaataaataaataacttcttacctaaatctagattcatcatattttacaaaatctagaaacaacctcagaacaataacaactccattcccagaaagagcctcccaaccccacctttgtgccaatcccaactgcatctgcctgtggatttcaaggttttcaaggctctgtggcttctctaagtataaaggctctgtccatggctattgtgagcaggccaggacatctgcaggggaggctcctcaggcagaagagctgctttttcaatgatctccctttgcaggcaaaactatccttagcttgcagtcactgagttcaggcttctacttcccagtcaggattattcacttagtttgaaataagaaaatgaccaatgtatggccagacatgatggctcacgcctgtaattgcagcactttggaaggctgaggcaggtggatcacttgaggtcaggagttcgagaccagcctggcaaacatggtgaaaccctatctctactaaaaacacaaaaattagccgggcgtggtggcatgcgcctgtaatcccagctattcagaaggctgaggcacgagattcccttaaacctgggaggctcccttaaacctgggaggcgcaggttgcagtgagccaagatcgtgccactgcactccagcctgggtaacagagtgagactcagtctcaaaaataaataaataataataattaaaaaaatgaccaatgtttcaaaaaagtgcaaaatcactccaacacactgtttatagaatagtgtaaggaaattgtaagacttaaattttcaactacaatataaaaagcttaagtaaggctgggcatggtggctcacacttgtaatcccagcactttggaaggccgaggcaggaggatcacctgaagtcaggagttcgagaccagcctggccaacatggtgaaacccatctctactaaaaatacaaaaattagatgagtgtggcagctggcaactgtaatcccagctactagggaggctgaggcaggagaatcgcttgaattcaggaggcaaaggttgtactgagccgagattgtgccaatgcactccagcctgggcaacagagcaagattccatctcaaaaaaaaaaaaaagcatctgtccttttcagatgataaacatctcatttaactatttccatgatagataatttaataaacaatcatatgtgaacatttctagaagatgtcaagttccatctcataaaatttagcattaaacttggacatctagacaacagaatacagaacagagattatccactgttacaaattctagacaccacaaaaaagaggagctgatggtttgagaaatatatacaatgcaccaattaatctatcacatttgcttgtggaaatatattcactttgtatagccataatgaaaaaaagatttttcctatttcttttctctggtagcattcccaaagcaaagcctggggttctatttaaaatcatgcaaccaggaaaagcagacatgagaaacttactacactcactctggagaagataaaggtaaataagaatctttaatacataaaatatatgagtagatttttctgaaatatacctttcatagtctgactttttaaacatcttttaaactcttctgataaaatataagttacagttattaaaaaactgaaatagaaatgtgaaaaaatctttccaaggtaaaaaactcaggaagaggcacatgccacaatgcctgactaatgtttttgtatttttagtagagacggggtttcaccatgttggccaagctggaaataattttttactctgcggccaggtgtggtggctcatgcctgtaattccagctacttgggaggctgaggtgagagaatcgcttaaaggcggagggaggctgaggtgagagaatcgctgggaggcagaggttgcagtgagccgagactgcaccactgcactttagcctgggcaacagagaaagactgtctcaaaaaaaaagcatactctgcactagcagcattaacacaaaaagttctagtaaaccctgacacccactcaaatgtcacatcctctataaagccctccttgattttcccagtgctatgtcactggcagaattgatcactattaccatttagctcctcaatactttataagtctttttatgtacaagggttattctctccagaataaattaatcatttacacacctatccatgctaatgaactataaactcctatggggcaggtatgttgaaccctgttcatctgtgtaatccaaatgtctgatacttaataggtgtcatatacacataaaatcaaaatgctgtcagggaattattggaaaagctaccaaattcttttttttttaacttttaagttcaagggtatatgttcaagttttttacataggtaaacgtgtgtcacgggggtttgttgtgcagattatttcatcacccaagtattaaggcctagtacccattaggtatttttcctgatcctctccctcctccaataggccccagtatgtgttcttcccctctatgggcccatgtgttcccatcatttgactctcacttataagtgagaatatgtagtagtttgttttgcttttttttttttttttgagatggagtttcgctcttgtcacccaggctggagtgcagtggcactatctcagctcactgcaacctctgcctcccgggttcaagagattctcctgcctcatcctcctgagtagctgggattacaggcatctgccaccacgcctggctaattttttgtatttttagtagagatgaggtttcaccatgttgctcaggctggtatcaaactcctgacctcagatgatccacctgccttggcctcccaaagtgctggaattacagctgtgagccaccacatccagctagtatttagttttctattcctctgtttgctaagaataatgtcttatggctctatccacgttcctgcaaaggacatgatctcatttttttttaatgggtgcacagtactccatggtgtatatgtactacactttctttatccagtctatcattaataggcatttaggttgattccatgcctttgctattgtgaattgtgctgcaatgcacatatgcatgcatgtgtctttataatagaatgattcacattgctttgggtaaatacccaataatggattgctaggtcaaatggtattttgtctctaggtcttcaaggagttgccacactgtcttccataatggttgaactaatttacactcccatcaacagtgtatacgcgttcctttgtgaaaaaataattttaattttctaaaaggttagctttctaagacaaatggtatgcgaggaaatttccacaggcctaagccatccagctgctcttctgagaggctacactcttcctcctcaggctgtcctctaagagatgacccaggggatgatattcattagacactccaagagatatggccactgtgggcatcttgggttatccctgacggttctgaaaatcatgaacaagaaaagaccggagggctgccacaaagggccctggaatttctccaaagcaaaacttcaaccgaaagacctactaacaaggtgtatgcaccagggaagataaaaggacagtcacagagattttttttctttttaacagtggagttccagaggattattttctcacgtaacatgtttacagacttcggaggttgaggcgggtggatcacctgaggtcaagaattcaagagcagcctggccaacatgaggaaaccctgtctctcctaaaaatacaaaaattagccgggcatggtggtgggagcctgtaatcccagctacttgggaggctgaggcatgagaatcgcttgaatctgggaggcggggattgcactgcactccagcctgggcaacaagagtgaaactccatctccaaaaaaaaaaagaaaaaaaaaattgtatacagacaacaattattttaaaacctgccatccactgctgtgtaagaacatgattaataataaaaacactgtgtttgaaatgtaaaataaaggacaaatagttgatagtgttgtaaattggagagaggaagttgttctcatttccacttttgagaatgtaggaacaaaggtggaaatttataattttactacaagcctgagttaagctagggtaaaagggtagtggattagaagtcctgcttgccatacattaggaagtcacagaggaaaaccagtcctcctgtggagtgttatttaaaaagcaggaaattagactgaaggggctctagtgccctgtgttcataagtaaaaaatgtaaaacctatctcggattcacttcttataaattattttaggcagaaacaaaattcaggcttaacctgcaattaacctctgattacataaccaggaaatttccacccgaatcatacaaataaggtgactacataaactgtaaccaattcttgaatttggtttgccttctcacacgcccttttcaaaacccttccctttttgcctttcaggtggcccacatattatggctgggtgctttccatttcactaatcactgctcagataaactcgttaacgttttaacgttgactccctttactttgcaagagaagaagctgggcgcggtggctcatgcttgtaatcttagcactttgggaggccgcggcggtggggggatcacttgagtccaggggttccagaccagcttccaccatggcgaaaccacttctctactagaaatacaaaaatcagccaggcgtggtggtgcaggtctttaatcccagcttttcggggggcttaggcacgagaatcgcttgaacctgggaggcggaggttgcagtgatcacgccattgcactccagcctcggcgacagagcaagactttgtctcaaacaaaccaacaaaatgtttaacaaaagagactgggagccccaccggccacagctcctcctacgcacacacgagtcgggattctgccctgatgacccgcctggcatccctgaacaatctgggaaacactcggggctgcgtgcagagctgcccagggagctccagatagggcgccgcagggactgggcgggacgcgcgggtcattgctgcgggcccagccaccatcttgcggccagagggacctgggacggagctgcgccagcagggactcaggtcggcaacccaggagcggtgaggaggccagtcccgtcggtttctcagccagctctcccctctcgggatgctcaacccctcacactcaccctttcccaccttctggaatgtcctggcatcttagctgtctgtgcacgtcccaggacctgcagatcacagggcaacagcctgtcaccggctggggcgagaggggggcagaggtggaggacgttgaatagcagaaagcgatcccaagctctggctgcagcgagagacaaaagccccgccaaatgccggatgccacgccctcctctccaactgtgccactgattcgataaagcaccagcactcgcccagtaccactccctccacccccaggaaaacaggctaaagcagggagtgtcaaccatagggaattacagccaattaagaagtaagctgagacttgaaatgaacttgctctttcccttacctgggtctgcttgtataatgcatcttatttgctacttaagggtaagaaaagaacatttggattatttttgtttgtttgagactgagttttgctcttattgcccaggcttgagtgcaatggtgtgatcttgtttcactgcaacctctgcctcccaggttcaagtgattctcctgcgtcagcctcccgagtagctgggattacaggcgcatgccaccacacccagctactttttgtatttttagtacagacggggtttcgccaagttgggcaggctggtctcgaactcctgacctcaggtgatcctcccaccccagcctcccaaagtgctgggattacaggcgtgagccaccatgcctggcccatttgaacatattttaacaactttttaatgattttgataatgcaggaaagaccctcatcccatccctgagtacctctctcatcatgctataccacgctgttgaccacatcgtgggatggccattaggaatggggcaggggtgggggaaagcggtggctgagaatggttaagcaaaaattatgttacccaaatttgtttattttagaaagacttctcaatcattctgtgtgaagtgtgtattccagggtaattgtgccctgactgcactgcatctcaatctgacttctcttttttaaaatcactggattactgtcactaatggggtattttattttctattttatttctatttgaaaatggccaactgtcctttgtgggtgtcctgatttgatttgctgggttagaccatggaggtaagagtgaggaaatattgggtcacatcagaataacttattctcatttagagaatatataggaattttttcttttttgagatggaggtttgcttttgttgcccagaagggagtgcaatcgtgtgatcttggctcactgcaaccttcttctcctgggttcaagcgattctcctgcctcaacctcccgagtagctgggattacaggctcccaccaccatgccctgggtctgtcagggtttcatcatattggccaggctggtcttaaactcctgacctcaggtgatccacctgcctcggcctcccaaagtactgggaatacaggcatgagccaccgcgcccagccaggaatttcttaataatatataacagttttctcaatacccattttatatgtatatgtatgtgtatatatatatatatatatatatatatatatatatatatatatatttttttttttttttttgagacagtgtttcacttttgttacccaggctggagtgcaatggcatgatctcagctcacctcaacccccacctcctgggttcaagcgattgtcctgcctcaatcctcccagcctcccgagtagctgggattataagaatgcgccaccacgcccggctaattttgtatttttagtagagatagggtttctccgtgttggtcaggctggtcttgaactcctgacctcaggtgatccgcccacctcggcctcccaaagtgttgggattacagccatttgccaccgtgcccggccaataccattatatttaacagtgatagcttacagggcagggaggggacacatatgacacaaccttagaattttaatttggtcgtaagtttttttgttttgttttgtttttggagacaaggtctcactctggtacctaggctggagtacagtggcacaaccatagctaataacttggttgtaacagttccttaaaaaatatttttggcagagtttgatggctaacacctgtaatccaaacactttggaagaccatggtggaatgattgcttaaacctaggagttcaagaccagtctgggcaatgtagtgagattcagtctcaacaaaaacgttaaaaattggcctcatgtggtgttgcatgcctgtagtcccagctacttgaaaggctgaggtggaaccatcactggaggttgaggctgcagtgaccagtgacccatcattcagctactacactccagcctgggtgacagagtgtatacacacacacacacacacacagagacacatacatatatatatacacacatatatatgtaccctatgtatataatcaaaataatatgtatgttgaaagaaattcaagcacagaagaaaagtgaaagaccctggttgggaatgtggtaaaagatgagcatggctcttacggctcagtgagatttgtttttccatcttgaggaactgctctcccacactgaaaccacaacccagcacatgccagttctcacactatttatactttgctcaaaggcagcagaaataggccaacatcatggtttctgacatggaagtctattccccactgagacattttaaaaatgttattctccctctccctctccccctccccctccccctcccccccatccctctccccacggtctccctctccctctctttccacggtctccctctgatgccgagccgaagctggactgtactgccgccatctctgctcactgcaacctccctgcctgattctcctgcctcagcctgccgactgcctgcgattgcaggtgcgcgctgccacacctgactggttttcgtatttttttggtggagacggagtttcactgtgttggccgggctggtctccagctcctaatcaggagtgatccgccagcctcggcctcccgaggtgccgggattgtagacggagtctcgttcactcagtgctcaatgttgcccaggctggagtgcagtggcgtgatctcggctggctacaacctccacctcccagccgcctgccttggcctcccaaaatgccgagattgcagcctctgcccggccgccaccccgtctgggaagtgaggagcgtctctgcctggctgcccatggtctgggatgtgaggagcccctctgcccggctacccagtctgggaagtgaggagcacctcttcccggcaccatcccatctaggaagtgaggagcgtctcttcccgggcgccgatcgtctgagatgtggggagcgcctctgccccgccgccccgtctgggatgtgaggagcgcctctgcccggccgcgaccccgtctgggaggtgaggagcgtttctgcccggccgccccgtctgagaagtgaggagcccctctgcctggcagccaccccgtctgagaagtgaggagcccctccgcccggcagccgccccatctgggaagtgaggatcgtctccgcccggcagctgccccgtccaggaggtggggggcagcccccgcccggccagccgccccgtcccggagggaggtgggggccagcccccgcccggccagccgccccgacccggagggaggtgggggccagcccctgcccggccagccgccccgtccgggagggaggtggggggctcctctgcccggccgccgccccgtccaggaggtggggggcgcctctgcccggccaccccttctgggaagtgaggagcccctctgcccggccgccaccccatctggggaggtgtacccaacagctcattgagaacgggccatgatgacgacggcagttgtgttgaatagaaaagggagaaaagggggaaatgtggggaaaagatagagaaatcagattgttgctgtgtctgtgtagaaagaagtacacataggagactccattttgttctgtactaagaaaaattcttctgccttgggatgctgttgaccttacccccaacctggtgctctctgaaacatgtgctgtgtccactcagggttaaatggattaagggcggtgcaagatgcgctttgttaaacagatgcttgaaggcagcatgctcgttaagagtcatcaccattccctaatctcaagtacccagggacacaaacactgtggaaggccccagggtcctctgcctaggaaatccagagacctttgctcacttgtttatctgctgaccttccctccactattgtcctatgaccctgccaaatccccctctgtgagaaacacccaagaatgatcaataacaaaaaaaagaaaaaaaatgttattatattaagccctcttccttctaataaagtctatacaaatacacacatacaagcctgaaactactctaaataaaatatcaggtttttaaaatcccataaagaaacaagcaaacacaaaatcagccactttgattgaggagagagtgggatggagggggttaggaggctgcccgtatcacctccgggcggcatgtggaggagcagatggagtctaggaagaccctggggagtcacttgttctgactgggctttctcctagctcgacactttgctaaccatttcctgggaagagcttaggaaactcctgtgctctagtgaggcagagcctcccctcacagggtattggcaaggaggcattctgagactgtgattgagaagctagcacagtgcttgacaagtacctgtgggaactgtcatcctctgtaactatcatgtggccttggagtgttcagatggcctggcctggcctggggcttggtggagatgtttgagggtcagctgctttaggctcccactttctcctcaatcaaagtggctgtttttgtgtctctttatttatggaatttaaaaacctgatatataaatagaaagtgcagctggaggtgccgaggctcagtgtctagaactgtgctgcttgggcttgcttgctggcctgtggccaggtgaactctgggtgtgaggtgcttcccaccctggatctacgatccccactacctctcccaggccctgagtaaccaacacaaggcggtgctaaagagccggtgagtgacagccatgaagcccatcaaggaagatttgaatgctatctgggctagggctgtcaggggtaggaactatggtggccttgtcttatcatggccccacccacagatgtgactgcctgtgctgcttctccagcagccagctgtctgtggccctgagcctgtcgtaccatgcctgcttcctcatgctgttcatgtttaaaaaaaaaaaaatctgagatggcgctgctggatgtgagtgctggaaatggggcgccacctttgtcctagggaattaggagctgaccagatacctcctgagtgccccctataacaagtggggagtggtgttgcactaaatgatgtcccccctcctcccaccaccgaagatgtgtttgtattggttcaatgaatatacaatgcagagacctaaatgaagacacatgaatgggtgtatgtggacatcagcttgcagctgggaaacaggtgcctctcattctccccagcaagtgtggaaggtgtccatgcccatgagtgtatagatctggcctttttcttaatttgttcacaaccccaggtctgttctgagtgaatgatgtgcagatgagatttctcaggtcattggtatgtttgaccttgtggctgctgcttttgctgccactacccccaagcccaacctggcttaaagtccaggctttaggtcaaaaagacggagggcttcctgtgttctgggatgggaagttctcgatctgtggtaggactgggtgttggggtacactttagtttcgtgtaggatgtgagctgcagtggttttattaattgtgattgccctggcctggttgtagctccgggtggggagaaggaatcaacagtggtgtttccccagatatccatgtgcccagccctggccttcctgccctcagacccagaagtaagcaccaccacagactctgacttgcctccctactccccataccccagatgggaataccttgaaggctacaatctggaagtattattctcctcattttaaccagacccacataaacacacagtgtgggagtgagggtaggatgggttggggacctggggagaaccagagtggaatcataaatccttgggaaaagttaaagatacagaagtggtggtaacctctccatgaagcccagctccctacctgatttttgccacacagtccctcctacagacactgtagggtggctctgggggttgttggggatccctataggcctgggctgctctctgtccccacctgcctgtgctccttctctcttttgttgttgttgttgttgtttgtttgttttgttttgtttttcagatggcagtttcattcttgttgcccaggctggagtgcaatggcacgattttgactcactgcaacttctacctcctcggttcaaatgattctcctgcctcagcctcctgagtagctgggattacaggtgcacaccaccacacatggctaatttttgtatttttagtagagaagggttttcgccatgttgaccagcctcatctcaaactcctgacttcaggtgatccgcctgcctcagcttcccaaaatgctgagattacagctgtgagccaccacacccggcccctgtgctccttctctttgcctgctgtcagggccctaacgtggagaaggaggcaggtcctcagcctcaggtatagctgaatgtcttttggagtgtttgaagcatgctttatgtcttagaaattctaaaaagtaaaacgaattccaattgtaatgtctgttagttttcctgagccaactggaagaaaaggatttttcacctgaaatttttaaatgacacccaaggatagccaccagtgtcttggccatggaaacctcctatgtgcttcccacccctggtttgatttgcaacctcatgattgtgttgccctgaacatactttcctctggtgaatatggttcacatggttaacaccacttcatgagaggggggcatcatgtagagatgagaatggattgtctttagttaccattgtgcctctttgtcacctgagaggctcacttttcctggctgattccataagtgtgttagtgttgtcagacacctctggacaactcaaatgacaaggggctgttgttttataaaggaaacaaaggctttggatgtgaaatccttcttttctttttcccttcttttaggtgaaatacttcagtttttttcttaagggtaaacagtggtatcttagcaggtttagcgtaagaattggcatgtgctaggttgtggtttcagtgtggatgggcagttcccaagatggagaaccaggtctcactgaattgcaggagccacactttctctttttcatatcccccaccatgtgcacgtgtgtgtgtgtgtgtgtgtgtgtgtgtgtttacacatacaggtctcactctgtaacccaagctggagtgcagtggctgaatgatgggtcactgcagcttcaaactttcagtcttaagtgatcctcctgcctcagcctccccagtagctgggaccaccggcatgcaccagcctgcctggttctttttttttttttttggtatttttttaaagtagagacagagccttgccatgttgggtaggctggtcttgaactcccgagctcaagcaatccacccgcattggcttcccaatgtactgaactacagacataagccactgtgcccggcctagttttattatctgattacacaagtatatttcttcataacaattcactgagctttacttgaatgaagaatttcttcatgtatttctctatgcatgttacatatcaataaaaaattacatagtacatatttgcacaaaatgctaactcactatctcaaaataacagcagtaatttttttttgcttgtttcatggtgagacacactcagaacatgatcatacttctctgctatcatgacacacttatttcacagttttttatggctctacaaacaatagaaataaagaaggggtctcttgtgtgcacttatggggtatacttaaatgtagagaattttgcagccaacattatatatgaaaaaacttacaccttgataggtaaaagatgaagggccagcctgtgtgagaaatttttatgggatatttgttccctcacaatatcagaaacagaatattggtccactgctcttaacctacttcataagttaaggacaactttttcacaataagttaaggagcatttccaggatgcccttactcttctgaatggccatgatttgttaggtctttctttccatggtataaagtaaatgaggcaatggttagaaatgtatccccccaatagggctctatagaagattatactgtaaaggctatgattacacaatagattttaaatttacttactaaagttgtgctaaataatattatttcattctttctttttttttttttttgagatggactctcgctctgtcgcccaggctggagtgcagtggctcgatctcggctcactgcaagctccgcctcccaggttcacgccattctcctgcctcagcctcctgagtagctgggactacaggcgcccaccaccatgcctggctaatttttagcatttttactagagatggggtttcaccatgttagccaggacggtctcgatctcctgacctcgtgatccacctgtctcagcctcccaaagtgctgggattacaagcgtgagccactgcgcccagcaataatattatttcttttaattacttattggatgaacagagaagtacctatgaagttgctaacacttgtagttgcacatggagaaatacgtagtgtaggctccctgagcctactctgcatccacggagatgcagttgcagcggattaatgaacagtgtgcttggttgaaatgagtagaccacttatctagctaactattcggcctatttaattttagttggtgtttcgtggggaccctggctaaaaagcatgcttcaaactcttggtatcattctcctgatagttgaaatagtagtgtctccctacttcaccgtattctctcaaaagttataaatgtttgcatgcagtcatctccaaaatgtcaaatgatctcttttaaaccagaatggcagaaactcaaagacacatgtgactacgaagacaccataacctatgaatgacatgataaggacaaaaacccaaaataggacaggtgcggtgcctgtaacctcagcactttgggagactgaagtgggtggatcatgaggtcaggagtttgagacaagcctgggcaacatagtgaaaccccatctcttctaaaaatacaaaaattggcctgttgtggtggctcaggcctgtaatcccagcactttgggaggccgaggtgggtggatcatgaggtcaggagatggagaccatcctgggtaacacggtgaaaccctgtctgtactaaaaatacaaaaaattagccagccgtggtggcatgggcctgtagtcccagctactcggaaggctgaggtgggagaattgcttgaacccaggaggtggaggtagcagtgaactgagatagtgccactgcactccagcctggacaacaaagcgagatttcatcttaaaaaaaaaaaaaagacagaaaaaaagataatggaaacagagtggcactaaggccctgagttttggtcacaccgtgacctatgtgagagcttacaaatagggtaatttttttttttttttgagatggaatcttgttctgttgcccaggctggagtgcagtggtgcaatctcggctcaatgcaaactctgcctcacgggttcaagtgattcttctgcctcagcctcccgagtagctgggactacaggtgtgcaccaccacgcccggctaatttttgtatttttactagagacggggtttcaccatattggccaggatggtctggatctcctgaccttttgatccgccagcctcagcctcccaaagtgctgagattacagacctgagccactgagcccggcctggggtgaattttttaaacaaaattatttatggccatcatctggactgagcatgtgcactcttcccaaacagaccaaaacaaaacaaaatgagtcactcatgccaaaagtgagctaatcaaacctaaaatttaagaaaatagctagatcttagaccagtttttctttgggaggcggaggcgagtggatcacctgaggtcaggagttcgagaccagtctgaccaacatggagaaacccctgtctctactaaaaatacaaaattaaagccaggcgcggtgcctcatgcctgtaatcccagcactttgggaggctgaggtgggtggatcttatcaactttagcatccaggaaggagcataaaagattttaaaaagagagagagagcaaagaacacagaagaaaaaccacagcaactccctctaagtgctgttgaagccaactaaaagtggggctagaaaaaaaaacagaggaagaagcttgagtagtttcacgtactcgggaggccgaatggaaagaccacctgggcaagactgaggagatcgaggctgcagggaatcacaatcgcatccttctcctggacctgaagagtactgccactggtgaccgctttctggtctaccttagacatggcaagctggtggccaagtccaatgctcatggctgaagtctgtcttaacataaataaactaacaactaacagtaaatatttaacaataataagtaataacaaataataacaagacaaataagtgagagggaacacagataaaaggtaattaatgtcacaattaattgttgtctctctttctctgtctctctcttcctcaatctccatgtgtcacactttcacacccaggctggagtgcacgtgtgtggtcacagctcattgctgatcactcacctgcactccagccagaatgtgatacagtaggaagacctagctaaaaataataattttatatatatatatatatatatatatatatatatatatatcacgtcaatttcagcatgcagaaaggagcataagaaaataaaagagagagaaagagcaaagaagaaaggaaaaaaaaaaaaaccacagcaactcactgtaagtactgcggaagaaaactaaaagtggagctggaaaaaaaaaagaacagaggaggaaagtccaagtattttcaggtactctggaggccaagatggatgggacgaccacctgtgaaagaccagggagattaatatcgcagtgaatcacaattgcatccctctgccttacctgaacactactactggtgagagctatctggtagaccttagaagtggcaagctggcagccaagtccaatgctcgcagccaacatctgcctcaaaattaataaataaccgacagtaaataataagaaagaaatgataatggacaataatattaccaataaataaataagtgggagtgaacaaaaataaaaggtaattaaaatcacaattaactgtatctctctctgtctctatttctctgcctctctctgtctttctgttttagtctgggtctctgtctctctgtctttctgaatctctcttccctgatctccgtgtgtcacactgtcaaacccaggctggagtgaacgtgtgtggtcacagctcactgctgatcatgtacctgcactccagccagggtgtgacagactgagaagacctggctaaaaaaatatatgtgtatatataaaacatcaacttcagcatacaggaaagagcgtaaaaaaaaataaaataagagagagagagagaatgagagcaaagaacaaagaagaacaactatagcaactctctctaagtactgtggaagcaaactgaaagtggggttagaaataaaacagaggaacaatgtctgagtagtcccaggtactcgggaggccaagatgggaagaccacccgggtgagactggggagatccaggctgcagtgaatcgtcatcacatctctcttctggacctcaatggtaccactgccagcaagagccaaatggtcaaccttaaacatggcaagctggcggccaagtccaacactcgtggctgacatctgtctaaaatgtataaacaaataaacaaacaatattttttttttttgagctggagtttcgctcttgttgcccaggctggagtacagtggcgtgatcttggctcaccgcaacctctgcctcccaggttcaagtgattgtcctgcctcagcctccggagtagctgggattacaggcatgcgccaccacgcctggctaattttgtagttttagtagagttgatgtttcttcgtgttggtcaagctagtctgaaactcccgacctcagctggtttgcccgcctcggcctcccaaagtgctgggattacaggtgtgaaccacctcgcctggcacataaatatttaacaataacaaagaaataacaaacaatgataagaccaataaataaataagtgggagtgaacaaaggtaaaatgtaattaatataacaactaattgttgtctgcctccctgtctctctctgtttctgtctctctgccactgtctgtttgtgtctctgtctttctgtccctctctccatcgatctccatgtgtcacactctcacacacatgctggagggcaggggcatggtaacggctcactgctgatccagcacctacactccagccagggtgtgacagtgagaagacctaccaaaaatcaaatttaaacatccacgtcagcgttcaggaaggagggtaacaaaaaagaaaaaagaaatggagcaaagaacaaagaagaaagaccacagcaaccccctctaaataccgtggaaacaaaatgaaagtgggagtagaaaaaaaaaagaaggaagatggcctgagtagtccaaggtaaatgggaggctgagatgggaagtcctccgggtgacatcgggaagatcgttgctgcattgaatcatgatggcatccctctgctgggcctgaacaatactactgccagtgagagccatctggtcaaccttatcaccagcgagagccatctgtttgaccttagacatggcaagctggcaactaatccaacgctcgcagccaacatctgttacaaaataaatatacaaaaaaacccaatagtagatatttaacaataactaagaaataataggctgggcgtggtggctcatgcctgtaatcccagcactttgggaggccgagacgggcggatcacgaggtcaggagattcagaccatcctggctaacatggtgaaaccccgtctctactaaaaatacaaaaaattagctgggcatggtggcgggcacctgtagtcccagctacttgggaggctaaggcaggagaatggcatgaacctgggaggcagagcttgcagtgagccaagatcgagccactgccctccagcctgggtgacagagtgagactccgtctaaaaaaaaaaaagaaataataacaaataattttaaagaccaataaataaatgagagtgaaaaagggtaaaaggtaattaatatcacaattaagatcttctttatttttctctctctctgattgtcacactcatgctgcagtgtgtcaaaaaaaaatctaagaggtcaacttcagcatgcagaaaggaacatagaaaaatagagtgagaagaacaaagatttaacacaacagcaagtcactctaagtactgtggaagaaactgaaagtggggttagaaccaaaacagaggaagtaggtcctagtagtcccaggtacttgagaggctgagatgggaagactacccttgtgagaccaagatcgaggccacggtggatcataatcacatccctctgctggacctgaaacggtatggccaccagcgaggccatctggtcgacttcagacatggcaagctggcagctaagcccaacgctcatggtcaatgtccatcacaaaatatataaacaaaccaacagtaaatatttaacaatatcaaagaaataataacaacaaacattaaacaccagtaaataaataagtggaagtgaacaaaggtaaaaagtaattaatattacaattaagatcttcttcactctttttctctctttctctctcttcatttgtcacacccagctggagtgtgaccaaaaaatctaaaaggtaaactttttaaaaaatttttattattattatactttaagttttagggtacctgtgcacaatgtgcaggttagttacatatgtatacatgtgccatgctggtgtgctgcacccattaactcgtcatttagcattaggtgtatctcctaatgctatcctttccccctcctgccaccccacaacagtgcccagagtgtgatgttccccttcctgtgtccatgtgttctcattattcaattcccatctatgagtgagaacatgcggtgtttggttttttgtccttgtgatagtttactgagaataatgatttccaatttcatccatgtccctacaaaggacatgaattcatcattttttatggctgcatagtattccatggtgtatatgtgccacattttcttaatccagtctatcattgttggacatttgggttggttccaagtcttagctattgtgaatagtgctgcaataaatatatgtatgcatgtgtctttatagcagcatgatttataatcctttgggtatatacccagtaatgggatggctgggtcaaatggtaattctagttctagatccctgaggaatcgccacactgacttccacaatggttgaactagtttacagtcccaccaacagtgtaaaagtgttcctatttctccacatcctctccagcacctgttgtttcctgactttttaatgattgccattctaactggtgtgagatggtatctcattgtggttttgatttgcatttctctgattgccagtgatgatgagcattttttcatgtgtcttttggctgcataaatgtcttcttttgagaagtgtctgttcatatcctttgcccactttttgatggggttgtttttttcttgtaaatttgtttgagttcattgtagattctggatattagccctttgtcagatgagtaggttgcgaaaattttctcccattttgtaggttgcctgttcactctgatggtagtttcttttgctgtacagaagctctttagtttaattagatcccatttgtcaattttggcttttgttgccattactttcggtgttttagacatgaagtccttgcccatgcctatgtcctgaatggtaatgcctaggttttcttctagggcttttatggttttaggtctaacgtttaagtctttaatccatcttgaattaatttttgtataaggtgtaaggaagggatccagtttcagctttctacatatggctagccagttttcccagcaccatttactaaatagggaatcctttccccattgcttgtttttctcaggtttgtcaaagatcagatagttgtagataagcggcattatttctgagggctctgttctgttccattgatctatatctctgttttggtaccaataccatgctgttttggttactgtagccttgtagtatagtttgaagtcaggtagtgtgatgcctccagctttgttcttttggcttaggattgacttggtgatgtggtctcttttttggttccatatgaactttaaagtggttttttccaattctgtgaagaaagtcattggtagcttgatggggatggcattgaatctataaattaccttgggcagcatggccattttcacaatattgattcttcctacccatgagcatggaatgttcttccatttctttgtatcctcttttatttcattgagcagtggtttgtagttctccttgaagaggtccttcacgtcccttgtaagttggattcctaagtattttattctctttgaagcaattgtgaatgggagttcactcatgatttggctctctgtttgtctgttattggtgtataagaatgcttgtgatttttgtacattgattttgtatcctgagactttgctgaagttgcttatcagcttaaggagattttgggctgagacaatggggttttctagatatagaatcatgtcatctgcaaacagggacaatttgacttcctcttttcctaattgaataccctttatttccttctcctgcctaattgccctggccagaacttccaacactatgttgaatagtagtggtgagagagggtatccctgtcttgtgccagttttcaaagggaatgcttccagtttttgcccattcagtatgattttggctgtgggtttgtcatagatagctgttattattttgagatatgtcccatcaatacctaatttattgagagtttttagcatgaagggttgttgaattttgtcaaaggccttttctgcatctattgagataatcatgtggtttttgtctttggttctgtttatgtgctggattacatttattgatttgcatatattgaaccagccttgcatcccagggatgaagcccacttgatcatggtggataagctttttgatgtgctgctggattgggtttgccagtattttattgaggatttttgcatcagtgttcatcaaggatattggtctaaaattctcttttttagttgtgtctctgcccggctttggtatcaggatgatgctggcctcataaaatgagttagggaggattccctctttttctattgattggaatagtttcagaaggaatggtaccagttcctccttgtgtctgtggtagaattcagctgtgaatccatctggtcctggactctttttggttggtaagctattgattattgccacaatttgagatcctgttattggtctattcagagattcagcttcttcctggtttagtcttgggagagtgtatgtgtcgaggaatttatccatttcttctagattttctagtttatttgcgtagaggtgtttgtagtattctctgatggtagtttgtatttctgtgggatcggtggtgatatcccctttatcattttttattgcgtctatttgattcttctctctttttttctttattagtcttgctagaggtctatcaattttgttgatcctttcaaaaatccagctcctggattcattaattttttgaagggttttctgtgtctctatttccttcagttctgctctgattttagttatttcttgccttctgctagcttttgaatgtgtttgctcttgcttctttagttgttttaattgtgatgttagggtgtcaattttggatctttcctgctttctcttgtgggcatttagtgctataaatttccctctacacactgctttgaatgtgtcccagagattctggtatgttgtgtctttgttctcgttggtttcaaagaacatctttatttctgccttcatttcgttatgtacccagtagtcattcaggagcaggttgttcagtttccatgtacttgagtggttttgagtgagtttcttaatcctgagttctagtttgattgcactgtggtctgagagacagtttgttttaatttctgttcttttacatttgctgaggagagctttacttccaactatgtggtcaattttggaataggtgtagtgtggtgctgaaaaaaatgtatattctattgatttggggtggagagtcctgaggatgtctattaggtctgcttggtgcagagctgagttcaattcctgggtatccttgttaactttctgtctcattgatctgtctaatgttgacagtggggtgttaaagtctcccattattaatgtgtgggagtctaagtctctttgtaggtcactcaggacttgctttatgaatctgggtgctcctgtattgggtgcatatatatttaggatagttcactcttcttgttgaattgatccctttaccattatgtaatggccttctttgtctcttttgatctttgttggtttaaagtctgtcttatcagagactaggattgcaacccctgcctttttttgttttccatttgcttggtagatcttcctccatccttttattttgagtctatgtgtgtctctgcacgtgagatgggtctcctgtatgcagcacactaatgagtcttgactctttatccaatttgccagtctgtgtcttttaattggagcacttagtccatttacatttaaagttaatattgttatgtgtgaatttgatcctgtcattatgatgttagctgtttattttgcttgttagttgatgtagtttcttcctagtcttgatggtctttacattttggcatgattttgcagtggctggtactggttgttcctttccatgtttagtgcttccttcaggagctcttttagggcaggcctggtggtgacaaaatctctcagcatttgcttgtctgtaaagtgttttatttctccttcacttgtgaagcttagtttggctggatatgaaattctgggttgaaaattcttttctttaagaatgttgaatattggcccccactctcttctgcgttgtagagtttctgctgagagatccgctgttagtctggtgggcttccctttgtgggtaacccgacctctctctctggctgcccttaacattttttccttcatttcaactttggtgaatctgacagttatgtgtcttagagttgctcttctcaaggagtatctttgtggcatcctctgtatttcctgaatctgaatgttggcctgccttgctagattggggaagttctcctggataatatcctgcagggtgtcttccaacttggttccattctccccatcacttttaggtacaccaatcagatgcagatttggtcttttcacatagtcccatgtttcttggaggctttgttcatttctttttattcttctttctctaaacttcccttcttgcttcatttcattcatttcatcttccatcactgataccctttcttccagttgaatgcatcggttcctgaggcttctgcattcttcacgtagttctcgagccttggctttcagctccatcagctcctttaagcacttctctgtattggttattctagttatacattcgtctaaatttttttcaaagttttcaacttctttgcctttggtttgaatttcctcctgtagctcggagtggtttgattgtctgaagccttcttctctcaacttgtcaaagtcattctctgtccagctttgttccattgctggtgaggaactgcttcctttggaggaggagaggtgctctgctttttagagtttccagtttttctgctctgttttttccccatctttgtggttttatctacttttggtctttgatgatggtgatgtacagatgggtttttggtgtggatgtcctttctgtttgttagttttccttttaacagacaggaccctcagctgcaggtctgttggagtttgctagaggtccactccagaccctgtttgcctgggtatcagcagcggtgtctgcagaactgtggatttttgtgaaccgcgaatgctgctgtctgatcattcctctggaagttttgtctcagaggagtacccggccgtgtgatgtgtcagtctgcccctagtggggggtgcctcccagttaggctgctcgggggtcaggggtcagggacccacttgaggaggcagtctgcccattctcagatctccagctgtgtgctgggagaaccactgctctcttcaaagctgtcagacagggatatttaagtctgcagaggttactgctgtcttttggtttgtctgtgccctgcccccagaggtgaagcctacagaggcaggcagacctccttgagatgtggtgggctccacctagttcgagcttcccagctgctttgtttacctaagcgagcctgggcaatggtgggtgcccctcccccagcctcgctgccaccttgcagtttgatctcagactgctgtgctagcaatcagcgagcctccatgggcgtaggaccctccgagccaggtgcgggatataatctcctggtgcgccgtttcctaagcccattggaaaagtgcagtattagggtgggagtgactcgattttccaggtgccgtctgtcacccttttccttgaccaggaaagggaactccctgaccccttgtgcttcctgagtgaggcaatgcctcgccctgctttggctcacgcatggtgcactgcacccactgtcctgtgcccactgtctggcactccctagtgagatgaacctggtacctcagatggaaatgcagaaatcacccgtcttctgcgtcgctcacgctgggagctgtagaccggagctcttcctattcggccatcttggctcctcccaccctaaaaggtaaacttaagcgtgtagaaagctacgtaggaaaagagagagagaaaagaaaaaaaaaagcaaaaggacagcaagtcattctaagtactctggaaaaaaactgaaagtggggttagaaaaaaaataggaagaaggtctcagtagtcccaggtactcaaggaggccaagatgggaagaccacccgggtgagactggggagatgaaggctgcagtggatcacagttgcatccctctgctggacctgaacggtactgccacaggtgagagccatctagtgaaacttagacatggcaagctggcagctaagtccaagggtcatgggtggcatcggtctcaaaattaataaacaaaaataccaacagtaaaaaaaaattaacaataacaaagaaataacaaacaatattaaggaccaaaagtaaataagtgggagcgaaaaaaaaggtaattaatatcacaattaagatcttctctctctgtctctctccttttgtcacatccaggctgaagtgtgacaaatgaaaaataacctaaaaattcaactgcaatgtgcatgaaagaccataggaaaataaagaaaagaacaaacaagaaaaacaacagcaagtcactctaagtactgtggaacaaattgaaagtggggttagtctgtaatattgtttgttattctttctttattattgttaaatatttactgttgggtttttaaatttattttgagactgatatcagcctcaaggcttggacttagcttccagcttaccatctttaaggctgaccagatgactctcgctatgccatgtctaaggttgactggatggctcttgctggaggtagtaccattcaagtccagcagagggatgccatcgtaattcactgtggcctcatctctctggtcccacccaggtgatcttcccatctcagcctaccgagtacctgggactactcggaccttcttcctctgttttttttttttttttcctaaacacacttccagtttgtttccacaatacttagagtgacttgttgttgtttatcttctttgttcttttgtctctctattctcctatgctccttcctgtatgctgaagctaatctttgttttttttttttttttttggtcacactctagactgggtgtgacaaagagacagagagagagagtgtgtgtgtgtgagagagagaaaataaatcttaattgtggtactaattaccttttacctttgttcactcccatttatttatttattggtctttaatatggtttgttattttttgttatcgttatatatttactgtaggtttttaaatatattttgagacagatgtcggttgcaagcattggacttagctgccagcttttcatgtccaaggtcgaccagatggctctggccttgccatgtctaaggtcatccatatgactcttgccagtggcagtaccgttccggtccagcaggaagatacgatcatgattcactgtggcccttgacctccctggtcttgcccaggtggtctacccatctctgcctcttgaatatctggggctactcgaaccttcttcccctgtttttttctaacctcactttcagtttctttccacagtacatagagtgatttgctgttgtttttcttctttgttcttttctcccagtattttcctacactccttcctgcatgccgaggttgacgttttgttgtgtgactacctggataagactggaaagatcaaggctgcagtgaatcaggattgcatccctctgctggagctgaatgggactgctgctgacaagagccatatggttaaccttagacagcaaaacgtgagccatctggaggaccttagacatggcaaggcaagagccatctggtcgaccatagacatagcaatctggtggctaagtccaatgcttacagccaacagctgtctcaaaataaataaacaaaaaacccaacagtaaatatttaacaataacaaagaaataataacaaacaatattaaagaaaataaataaggaggagtgaaaaaggtagagtacaataaatatcacaatgaagattttctcctctctctttctctccatttgtgacacccaggctggagtgtgacaaaaaaaaaaaaagaaagaaagaaaagaaaataggttaacttcagcttacaggaagaagtgtaggaaaatagagaaaagaacaaagaagaaaaacaatagcaagtcactataagtactgtggaaataaactgaaagtgggttgagaaaaaaacaaacaaacaaacaaaaacagaaaaagaagttctgagtagtcccgggtacttgggaggctgagatgagaagaacacgcaggtgtgaccagggagattgaggctgcagtgaatcacgatcacatccttctgctggaactgaacagtactgctaccagtgagagccatgtggtgaatcttcgacatggtaagggaagagccatctggttgacctaatacatgtcagggtgagaaccatctggtcaaccttagacatggcaagctggcagctaaatccaatgctcactgccaatgtctctcaaaataaataaacaaaaaaagtaaatatttaacaataacaaagaaatgataacaatattaaacaccaataaataaatgagagttaacaaaggtaattaatatcacaattaagatctttctctctctctcctctgtgtgtgtgtctctcccctttgtcacacccaggctagagtgtgataaaaaaatatttaaaaggtcaacttcactgaggaggaaggagcataggaaaacacagaaaagagcaaagaagaaaaacaacagcaggtcactgtaagtactttggaaacaaactatcagtagggttagataaaaaacagaggaagaaggttgtttcaggtacacgggaggccaagatggatagatcacccaggtgagactgggaacattgaggtcacagtgaatcacgatcgcatccctctgctgcacataaactgtactgtcaccagcgagagccatctgctcgaccttatacatagcaaggcaagagatacctagttgaccttagacatggcaagctggcagctaagtccaatgcttgtggctgagatctgtcaaaaaataaatacacaaaaaacaacagtaaatatttaacaataaagaaatagtaacatacaatattattgaccaataaataagtggaagtgaacaataataaaaggtaattaatatcacaattaagatctcttttctctttctccctgtatgtcacacccaggctacagtgtgataaaaaaatctaaaagtcaacctcagtgtgcaggaaggagtgtaggaaaatactgagagaaaagaacaaagaagaaaaacaacagcaaatcactctatgtactgtggaaagaaactgaaaatggggttggaaaaaacagaggaagaaggtccgagtagtcccaggtattcaaggggccgagatgggttgaccacctgggcaagaccggggaagtgaaggccagagtgaatcaccattgtatcctcctgctggacctgaacggtactgccactggtgaaaatcatatggacgatcttagacatggcaaggcgagagccatctggtcaaccttagacatggaaagctggaggctaagtccaacgcttgcgactgacatctgtctcaaaataaatttaaaaacctacagtaaatacataacaacaaaaaaaattaaagaccaataaataaataaatgggagtgaacaaaggtaaaaggtaattagtgtcaaaattaacatttattttcacacacacacacacacacacacacacactctctgtctctttgtcacacccagtctggagtgtgaccaaaaaaaacaaaccaaaaggtcagcttcagcgtacaggaaggagcataggagaatagaaagaaaaaagaacaaagaagataaacaacaacaagtcactcttaagtattgtggaaacaaactggaagtgtgtttaggaaaaaaacagaggaagaaggtccgagtagtcccaggtactggtaggctgagatgggaagatcacctgggtggaaccagggagatcaaggacgcagagattcacaatcgcatccctctgctggacctgaatggtactacctccagcgacagccatccagtcgaccttagatatggcaaagcgagagtcatctggtcagccttaaagatggtaagctggaagctaagtccgaggctcgaggccgatatcagtctcaaaataaataaacaaaaaaacccaacagtaaatatttaacaataacaaagaataacaaccaatattacagaccaataaagtgggagtgaacaatggtataaggtaattaatatcacaattgagatcttctcctttcctctctcttttttctctctctctctctcttttttccatttgtcacaccgaggctggagtgtgacaaaaaataaaatctaaaacttcaatttcaatgtccaggaaggagctaaggaaaatagagaaaagaacaaagaagagaaacaacaacaaatcactctaagtactatggaaacaatctgaaagtggggttagagaacaaacagaagaagaaaatgcgagtactcccacgtactactcggaaggccaagatgggtagaccacctgggcaagaccggggagatggaggccacagtgaatcacgattgcatccctctgctggacctgtgtggtactaccgccggcaagagccacctggtcgactttagacaatgcaagctgttggctaagtccaacacttgcgaccaacatctgtctcaaaataaatttaaacaccaacagtgaatatataacaataacaaaaaatagcaaacagtatgaaagaccaataaataaatgagtgaacaaaggtaaaagataattaatattacaattaagaccttctccccttactctcattttttctctctctctctttctctccctgtttgtcacactcaggctcgagtgtgacaaaaaaataaaccaaaaggtcaacttcagcatgcaggatggagcataaaagaatagtttgcgggttagggctcagaaatggaaggaaggctgggaaatgcaggaccacaagaaatgaaaagctgtgttcattctcccctggtgaccctatgctcagcagggactagcagaaactgagggttttgtgatttgaaagggaggatgagtccagccacatacccctggctgttacctaatgtgtgggcttcactaacattagatagtaatttggggaaaagagtagaaatagatcatttgtttgtctccatgtaattttttttttttaagacaaagtctcactctgtcacccaggcaggagtacaatagtgcaatcttggcacactgcaacctctgcctctggggctcaagcaattatcctgcctcagcctcccaagtagctggaactacaggcgaatgccaccgtgcccagctaatttttatatttttgtagagacggtgtctcaccatgttccccaggtgattcaccctcttctgcctcccaaagtgagctcaggtgattcaccctcttctgcctcccaaagtgctgagccacaatgcccagacttcatataagagttttcagtgtgagttttttttttcttctactggtcagcatagaaccttttttcaacatgtgagtttcttcctaattactggattgtggcaccaaaaaaaaggcatatttgaagttctaaatgtcatattatacattgtgaagtgacttctcaggactgatcttatctaagaaagaagtctggagaaagagagaaaagaaagagacatgaagaatggcaatatcaacccaggtgatagtcattcttggttgattatcttcttaatgcagtgctgtgtttagcactgactaacctttgattctgcagtctcctacctgacacattggcttgcactcacccaggaccttacctcagtctcctcccatctttatttaactgtcatttcatgaaatggcacttgtgaaaaggctctgtatagattgtcttgggcaaagcttcactccagacctagattgaggacacggagtgggctctgtgggttcagtagagttgagctgcagggattgtttaggggccacatctggaggtaccatctgctttctctgaaccaaaattaaacaaaatgcacatgtaatggtgcattaatatccaggaagacctggggaatcttagacaacaaatattgataccaaaaaactggctaagtttgacttcataatgcatttgaagctaacccaagtgaattagtgctgtttgagcctcaaagtagaatccataaaactctacaattacaaatataagccaattccatctttaaattaaatttgttgtaggttgtgccttgtctgaaaaagtaactcttctgttccagaaactgaccactgccaaaaccatgcataaggtgtgaaataattactaactcataggctgaaattgtggaaagaatataatatcaagaacataagccattccataactgatcataatttaatataatgtaattctcagtggtcctcattgttgctttgtgatgtataaagatatggaatatgttttatgaaaagttcttcaatacattttgactattaatccgctaactcttattttctctacaagagtcaggaatgactccaagattagtagatatatttctccaataccttcatgcatataaagtgcatagaatgtagctgattgaattatcttattcttttcaaaaatattaaatgtaggttttttgttgtgttattttacctgctagggcatattatatacttaagaaagatcataattggatggcgacagaaaacatctggtctttgtcaattatgataagactatttgcttcattaaatcagggaaggaggattcaaggaaaggtaacttgatgaccttaatgttttcacattagaaaaaaaaaagcatggatttcaattgttttcagaattgaatagtttgtgacatttcttcttggtttaaaaatattctaaagccgcagcctggccaacatagtgaaagcccatctctactaaaaatgcaaaaattagccgggcatggtggcatgtgcctgtagtcccagctacttgggaggctgaggcaggagaatcacttgaacctaagaggcggaggttgtggtgagccaagatcgtgccactgcattctagcttgggcaacagagggagactccgtctcaaagaaaaaaaaaattctaaacccttgccaggcttaatattcaactatttcaattatttaagtaaataagtatctgtgcctccagttttcctctccaaaatggatttgttttaatatatttaatgattctaacattgaaataactttatttgatgttttcattcactaaaaatacaattttccctgtaataaatggttagatttaatttggttagatttaaatgagatcgctacaatcaaaactcttttaaagtacaaatatattttataactgacaaatatgcaaaattaaaaataacaaatttgtgacatattaaagtgtatctgtgtctgtaagattgagaaacatagtggataagcacattgtctacacctgaaactttctttttacaatgaggtgactttagaaatgtcattcagccttcttttgtttaatatctccttacctgtaaaaagggaacaataaagcacattgtagatgtatgataaaaatacatgtaaaacctgttatagtattctagagtagtgttatagtatagtgggaatatatatgtttttctctttagaacaaaagtattgtgaaataaaagtttcaataaaatatttctgagttggatacaatgggaagtacacagtagaatgtttctattttctccataaaacagacctcatctgtccatgaaagatctcctcacgtggaaatgaaattatcagttacttgaaaatatcagattgtctccagtaatatagcagtaggaatgatcttatctcagaccatagttaaatagttggattttttttcttccttgacatcagattttctttaattaccagatgcacattgtgatacacagatttgactctcaagcacctatggccaactccttggtactctccaaaaaggtcccttagacaatgactgatttggagttgaaatattttttcagtaatattagatagaaagttgttttctgtattcacagagtggccacagcatgtgcattggcaccatctgcctcttgagtatctcccaggtcatcaccatcagcccccaaaacctcaggtgaacgtagcttaaactacatgcttccaaatatatttgaatctctaatatccaaattatgtgctgaattctgaataggcttgtaaatgtcattttttcctgtgtatgttactggtaagtggaacaccataaagaacacaaagattattttaaacactgttctggagtagttaataacagaattccacatttatgacatgtcatgtttttatcattttttagtgttttgtgtttggaaattataacctgggccaacagctccatgacctttattctgttcaacacaagtggtgggtccaacatattcataggtccaacaccactcctaaattctcacatgagtccagagtcacccaaagcatctttgtcctaaaggagcacctttgtatcattttacactctctcctacatcttttcagtatatatggttattttgtataattcaaattgttggcttatgaacaactctaaactgattaccgcttgtttttttctatagtcaggcccattgttctcctaagccatgaccccaggataaacagtataacctcttcatgctgtggaaggaatatacagtttcctaagataatcagatagatctacattttatgtggaattattttttaaatgtgcagacatgtattcattattttatgcagaggttaaattcccacaaagagcagtcacatatcagagaacctgtgaatcacagactgagtccctgccctcatagaatttattgtatggtagcaatgacagttacagactaaatgttttgaatagttttttgataattttctatttactaaatgttataataaagaaatgtagaggccaaaaatttatcttaaaattgggcctctaataatttagacaatggaaagcttatatggttatgtagctttaaactaattaagttaaaatgtcatagatggctcataggtacatcaagatggtagaatggaaggcttcgccaaccatcccccctgcaaggacaccaatttaacaatgacctacatttaaaaagcaccttcgtaagaaccaaaagtcaggtgagcactcatggtacctggttttaacttcatattgctgaaagaggcactgaacgggtaggaataacagtcttgaatcttttacactatttttcccacatcccccaacaatggtggcatggtgcagaaagggagagttcagcaattgtgaggcattgaattcagtgctttcctgttataacggaaagaaaaagcaaaccaaactcggctaacacttgctgatggaggaattatttaaaccatatagttaaatacagttgctggtgatagtaagtacacagaaaattaaataatattataacaccgtaactgtggtgtgtgaactacttttatgcaaggtagaaagactaaacaataaaccaatcaaaaataacaactgcaacaacttttcaagacatagacagtaaaattacatataaatagaaacaacaaaaactgagggaagagatttaaagcatacagtttttattattctttttgcttctttgtttattcaaacagtgttaagttgttattagattaaaataatagattacaagatagcatttgcaagcttcatggtaacctcaaaccaaaaaacatacaagaatacacaaaaaataaaaagcacaaaactaagtcacatcaccagagaaaactaccttcaataaaaggaagacaaaaagcaaagaaagataaaagagaagacctccttcactaaaaggaagacaaaaagcaaagaaagataaaaaagaccccaaagcaaccataaaacaaataaaatggcagaagtaaggttttgcttatcaataataacattgaatgtaaatggactaaactcgccaatcaagacagagtggatgaatgtatataaaaacaagacatattgatcctttgcctgtaagaaattcacctcatctataaagacatacatagactaaaaattttagaaatggaaaaagatattcaatgtcaattaaaaaaatgcagtagtagctatacttacatcagaaaaatagatttttagacaaaatttataaggaaagacaaagagggctgggtgcggtggctcacacctgtaatcccagcactttgggaggccaaagtgtgtgggtcacgaggtcaggagttcgagaccaacctggccaatatggtgaaatcccatctctactaaagctacaaaaattatttggtcgtggtggcatgcacctgtagtccgagctgcttgggaggctgaggcaggagacttgcttgaacctgggaggtggaggttgcagtgagctgagattatgccactgcacttcaagagcaagactccatctcaaaaaaaaaaaaaaaaaaaaaaaaagacagagaggttactatgtaatcataaaggggtaaatttaacaagagggtataacaattttaaatataaatacaaccaactcttgagcactgaaatatataaagcaaatattattagagcctgagagagatagactctaatacaataataggtggagactccaaaaacccactttcagcattgaatagatgttacagatattccagacacattatcaacaaagaaacattggacttaatctgttgcactatagaccaaatgtacctagtaaatatttacaggacattttatctaatggttgcagaatgcattcttttctttagcacatggattattttcaaggatagactatatgttaggtcacaaaaaagtcctaaaacattcaaaaactagaaataatatcaaacatcttatttgtccacaatggaataaaattataaattaataagaagaggaattataaaaactatacaaatacacaaaaataaacaatatgcttctgagtgattattgggtccatgaagaaattaagaagaaaattaaaaatgttcttgaaacaaatgataataaaagcactgtgtatcaaaatctatgggatacacaaaagcagtactaacaggaatgtttataggtataagtgactacatcccaaaaatgggaacattttcaaataaacaacctaataatgtatcttaaagaactagaggccgggcgcggtggctcacgcctgtaatcccagcactttgggaggccgaggcgggcgaatcacgaggtcaggagatcgagaccatcccggctaaaacggtgaaaccccgtctctactaaaaatacaaaaaattagccgggcgtagtggcgggcgcctgtagtcccagctacttgggaggctgaggcaggagaatggcatgaacccaggaggcggagcttgcagtgagccgagatcccgccactgcactccagcctgggcgacagagcgagactccgcctcaaaaaaaaaaaaaaaaaaaaaaaagaactagaaaagcaagaacaaaccaaacccacagttattagaagaaaaaaatcataaagattagagcagaaatcaatgaaaaaatttggcttttttgaaaagttaaaaattgacaaaccttcagcagactaaacaaaattttaaaatccaaatttaaaacaatttaacaaacaaaaaaataaactaagaaacaagagggcaagttagtgaggcctacaggctccaggacaatgtaagagatctcagaagcctcccatgctttcttgtttgcctccgctgttctgaggtatccagttaactcacaagactccatcatcccagcctggaaaatgactctggttccacttccaaaaaagaaccccaaagctatgacagggatggccttcagatcagtgataggatgctctgccatgttctatactaagctgagtgctcagtcccacaaaccgccaggccaatttttgctctgaaaaacctccagaggataatagagaaatttctaaggatctgagagtagagtgggtaactgatagacagcaaggtcaactcacctttttaagcctttgaaatttagaggccactcaggtcaattacttcaatttacagagaaaaaagtttgaggttttcactactgtattcccctccatactgggtgtagggggattcctcccggttttaattacagagagcagtgaatgcagaagccaagtttttgtcctctgaaagctttcctggggatggccacagcccaggcagatccatgggaaccttgaagttcccaagtcatcagttataggtcctggacatgttaccaggagactgggtgcccctaccccatggcaaagctgccgccatcctctgtcttctttcttctcgtcactccatcagtgttaactcttcctttaacctgagaagtctgtgtgtgtgtgtgtgtctgtgtgtgcacacgtgcatgcaaaactgtgcaggtttaatgatgcagacatgagtttgctgcatatgagaaaattggcagaaattctcaggatctcagggactctcattcctaaagcaaaccccattataaggatgaaccttggcctatgaggtcagaatgctcttttatcctctggactctgccaactttatgttctctgggccattctctgcttctctccagacttcaatttcccagttatccagtgagatgttagatgtcaaagtgcttaaaccacagctcagcctgcacatggtgcaagttccctaccaactaggatgggtgtagcagagctgtgatgagggtgtgcccagatcttcctcacttgggcagaaatagatgggttctgcactgggcagctggaccttctgtccaaaaagtcatgcacacaggatccttcaaggcccacagacaatgtgtgcatgtgggacccacctttatcccccagcagctcccactggagcatacccaatatgtcccctgtcctctgcatctagaaagtggtgacatccacacttaacacacggactgataagccctttgtggtggagtagtcctacaaaaagaatctgagatgctattactgtacaaggaattatggaggtgggccatatagaagcactagaacttcagaattaaatctccccactcctgcctccaccactatgcagataagaaaatgtcttaagaaagagacatgtcttaccgaagattaccagggattccatgtcaaagctagcactttggttaggattacatttgcctacaagtagaaggatacccaatataatagtagtgcagacaaaagacagaatgctttctttctgataaataagaatcttagagctggacagtccatgctgactctggactgtgcaccaaggcagtcaaaaataatctatctttttgctacaactttttttctaacttttaagttcaggggtacatgtgcaggatgtgcagctttgttacataggtaaatatgtgtcataaagattggttgtatacattgttttatcacccaggtattaagcctactatccattagttattttttctgcttctctccctcctcccactctccacctcatgatatgccccagtgcatgttgttccttctgtgtgttctcatcatctagctcccacttgtaagtgagaaaatgtggtatttggtttccttttcctgcattagtttgctaaagataatggcctccaacttcttccatgtctaaaaaggacatgatcttggtttttttttttaatggctgcatagtattctgtggtgtatatgtactacattttctgcatccagtctatcattgatgaacacgtgggttgatttaatgtatttgctattgtgaataggtctgcaatgaatgtgtgtgtgcatgtgtctttataatagaatgactttataatagaatgacatattcatttgggtatatactcagtgatgaaattgctgggttgaattttatttctgtctttaggtctttgaggaatcatcacactgtcttccacaatggttgaactcatttacactcccaccaacagggtaaaaacgttcctttttctccaaagttttaccagcatatgttattttttgactttttaataatagccattttgactggtataaaacaatatctcattgtggtttggatttgcatttctctaatgatcagtgatgttgaggttttttcatatgcttttttagctgcatgtatgtcttcttttgagaagtgtctctttttgtcttttgctcactttttaatggggttgtttacttttttcttgtaaatttaagttcttacagatgctggaaattaaatctttgtcagatgcatagtttgcaaaaattttctcccattctgtacgtggtctgcttactatgctgatagtttttgttttttcttttcttttctttttttctttcctttttttttttttttgctgtgcagaagctctttagtttacttagatcccattcatcaatatttcctttgttttaattgcttttggcatcttcatcataaaacatttgcccatgtgtatgtcctgaattgtattgcctaggttatcttccaaagtttttatagtttggggttttacattttagtctttaaaccatcttgagttgattattgtatatgctgtaaggaaggagttcagtttctttttttaaattttactttaagttacaggatacaagtgcagaatgtgcaggtttgttacataggtatacatatgccatggtggtttgctgcacctatcaacccattatctaggttttaagccatgcatgcattagctttttgtccttatgctctccctctcctcacctcccatcctccgactagccctagtgtatgttgttcccctccctgtgtccatgtgttatcattgttcaactcccacttacaagtgaggacacgtggtgtttggttttctgatcttatgttagtttgctgaagatgatggaggaagagagtccgtttcaattttctgcctatggctagccagttatcccagcaccatttattcaatggggtgtccttttcccattgcttgtttttgtcagttttgccaaaaatcagatagttgtagccatgtggtcttatttctgggttctctattctgttttattggtctgtgtgtctcttcttgtaccagtaccatgcctttttggttactatagccccgtagcatagtttgaagttgggtagcatgatatcttcagctttgttatttttgcttaggattgtcttgagtattcaggctcttgtttgtttcaatatataatttttttaattatactttaagttcttgggtacgtgtgcagaacgtgcagttttgttacataggtatatatgtgccatgctggctcactgcacctagcaaccagtcacttacattaggtatatctcctgatgttatcccttccctagcccccgacagcctgacaggccccagtgtgtgatgttcttctcattatgtccatgtattctcattgttcaactcccacttatgagtgagaacatgagctgtttgattttctattcttgtgatagtttgctgagaatgatggtttccagcttcatccacgtctctgcaaaagaaatgaactcatccttttttatggctgcatagtatttcatggtgtatatgtgccacattttctttacctagtctattattgatggacatttgggttgtttctgagtctttgctattctgaatagtgctgcagtatatgtgtgcatgtgtctctatagtaggatgatttataatcctttggttatatacccagtaatgggattcctgggtcaaatggtatttctagttctagatccttggggaattgccacactgtcttccacaatggttgaactaatttacactcccaccaacagtgtaaaagcatccctatttctccacatcctctccagcatctgttgtttcctgactttttaatgatcaccattctaactggcatgagatggtatctcattgtggttttcatttgcatttctctaatgaccagtgatgatgggcattttttcatacgtctgttggctgcataaatgtcttcttttgagaagtgtctgttcatatcctttgcccactttttgatggttttttttttcttataaatttgtttaagttctttgtagattctggatattagccctttgtcagatagatagatggcaaaaattttctccctttctgtgggtggccttttcaccctgatgatagtttcttttgctgtgctgaagctctttagtttaattagatctcatttgtcaattttggcttttgttgccattgcttttggtgtattaaacatggagtttttgcccatgcctatgtcctgaatggtattgcccaggttttcttctaggatttttatggtcctaggttttatgtttaagtctttgatccatcttgagttgatttttgtataagatataaggaaggggtccagtttcagttttctgcatatggctagccagttttcccaacaccatttattaaatagggaatcttttcctcattgcttgcttttgtcaggtttgtcaaagaccagatgattgtaaatgtgtggcattatttctgaggcctctgttctgttccattggtctatatatctgttttggtaccagtaccatgctgttttggttactgtagacttgtagtatggtttgaagtcagatagcatgatgcctccaggtttgttcttcttgcccaggagtgtcttggctatgtgggatctttttttggttccatatgaagtttaaagtagctgtttacaattctgtgaagaaagtcagtggtagcttgatagggatagcgttgaatctataaattactttgggcagtatggcagttttcaagatattgactctctctatccataagcatggaatatttttgcatttatttatgtcctctctaatttccttgagcagtggtttgtagttctccttgaagaggtccttcacatgccttgtaagttgtattcctaggtattttattatctttgtaacaattgtgaatgggagttcactcatgatttggctgtcagtttgtctgttattggtatatagaaatgcttgtgatttttgcatattgattttgtatcctgaaactttgctgaagttgtttatcagcttacagagattttgggcagagacaatggggttttctaaatagaaaatcatgtcatctgcaaacagagagaatttgacttcctctcttcctatttgaatatctttatttgtttctcttacctgattgccctggccagaacttccaacactatgttgaatagtagtggtgagagagggtatacttgtcttgtgccagttttcaaagggaatgcttccagtttttgtccattcagtatgatattggctgtgggttagtcataaacagctcttattattttgagatacgttccatcaatacctaatttattgagagtttttatcttgaaggggtgttgaattttgtcaaaggccttttctgcatctattgagataatcatgtggtttttgtctttggttctgtttatatgatggattacgtttattgatttgtgtatgttgaaccagccttacatcccagggatgaagcccacttgatcatggtggataagctttttgatgtgctgctggattgggtttgccagtattttattgaggatttttgcattgatgttcacctgggatattggtctaaaattctctttttttgttgtgtctctaccaggctttggtgtcaggatgatgctggcctcataaaatgagttagggaggattccttctttctctattgattggaatagtttcagaaggaatggtaccagctccgccttgtacctctggtagaattcggctgtgaatccgtctggtcctggactttttttggttggtaggcgattaattattgcctcaatttcagagcctgttattggtctattcagggattcaacttcttcctggtttagtcttgggagagagtatgtgtccaggaatttatccatttcttctaaattttctagtttatttgcatagaggcatttatagtattctctgatggtagtttgtatttctctgggatcagtggtgttatgccctttatcattttttattgcatctatttgattcttctctcttttcttctttattagttttgctagctgtctatcaattttgttgatcttttcaaaaaaccagctcctggattcactgattttttgaagggttttttgtgtctctatctcctttggttcttcccttatcttagttatttcttgccttctgctaggttttgaacgtgtttgctcttgcttctttagttcttttaattgtgatgttagggtgtcaattttagatcgtccctgctttctcttgtgggcatttagtgctataaatttccctctacaaactgctttaaatgtgtcccagagattctggtatgttgtgtctttgttctcattggtttcaaagaacatctttatttctgccttcatttcactgtgtacccagtagtcattcaggagcaggttgttcagtttccatgtagttgagcagttttgagtgagtttcttaatcctgagttctagtttgattgcactgtggtctgagagacagtttgttataatttctgttcttttgcatttgctgaggagtgctttacttccaaatatgtggtcaattttggaataagtgtgatgtggtgctgagaagaatgtatattctgttgatttggggtggagagtcctgaggatgtccattaggtctgcttggtgcagagctgagttcaattactggatatccttgttaacttactgcctcattgatctgtctaatgttgacagtggggtgttaaagtctcccattattattgtgtgggagtctaagtctctttgtagatctctaagcacttgctttatgaatctgggtgctcctgtattgggtgcatatatatttaagatagttagctcttcttgctgaattgatccctttaccattatgtaatggccttctttgtctcttttgatctttgttggtttacagtctattttatcagagactagaattgtgacccttgcctttttttgtttcccatttgcttggtagatcttcctccatccctttattttgagcctatgtgtgtctctgcacatgagatgggtttcctgaatacagcacactgatgggtcttgtctctttatccaatttgccagtctgtgtcttttaattggagcatttagcccatttacgtttaaggttaatattgttgtgtgggaatttgatcctgtcattatgatgttagctggttatgttgctcgttagttgaggcagtttcttcctagcatcaatggtctttacaatttgtcatgtttttacagtggctggtaccggttgttcctttccatgtctagtgcttccttcagcagctcttgtagcgcaggcctggtggtgacaaaatctctcagcatttgcttgtctgtaaaggattttatttctccttcacttatgaagcttagtttggctggatacgaaattctgggttgaaaattcatttctttaagaatgttgaatattggtcccctctctcttctggcttctagagtatctgctgagagatccgctgttagtctgatgggtttccctttgtgggtaacccgacctttctctctggctgcccttaacattttttccttcattttaactttgaggaatctgacaaatatgtgtcttggagttgctcttctcgaggagtatctttgtggcattctctgtatttcctgaatttgaatgttggcctgccttgctagattggggaagttctcctggataataccctgcagagtgttttccaacttggttccattctccccatcactttcaggtacaccaatcaggtgtagatttggtcttttcatatagtcccatatttcttggaggtttgttcatttcttttcactcttttttctctgaacttctcttctcacttcatttcattcatttgatcttcaatcactgataccttcttccagttgatcgaatcagctactgaagcttgtgcattcgtcacgtagttcttgtgccatggttttcagctccatcaggtcatttaaggacttctctgcactagttattctagttagccattcatctaatcttttttcaaggtttttagcttctttgcattgggttcgaacttcctcctttagctcggagaagtttgatcatctgaagccttcttctctcaactcatcaaagtcattctctgtccagctttgttctgttgctggagctgcattcctttggagggggagaggtgctctgatttttagaattttcaacttttctgttctgttttttccccatctttgtggttttatctacctttggtctttcatgatggtgacttacagatggggttttggtgtggatgtcctttctgtttgttagttttccttctaacagttaggaccctcagctgcaggtctgttggagtttgctggaggtccactccagaccctgttttcctggtatcagcagcagaggctgcagaactgcgaatattgttgaacagcaaaagttcctgcctgatccttcctctggaagcttcatctcagaggggtacccgaccatgtgaggtatcagtttgccactatgggggggtgcttcccagttaggctactcaggggtcagggacccacttgaggaggaagtctgtccgttctcagatctcaaactctgtgctgggagaaccagtactctcttcaaagctgtcagacaggggcatttaagtctgcagaggtttctgctgccttttgtttggctatgccctgcccccagaggtggagtctacggaggcaggcaggcctctttgagcagcagtgggctccacccagtttgagcttcctggccacttgtttacatactcaagcctcagcaatggcgggcgcccctcccctagcctcactgtggccttgttgtttgatctcagactgctgtgctagcaatgagtgaggctctgtgggcgtgggaccctctgaaccaggcacgggatatattctcctggtgtgccatttgctaagactgttggaaaagtgcagtattagggtgggagtgacccgattttccaggtgccgtctgtcaccccttccctttgctaggaaagggaattccctgaccccttgtgcttcccaggtgaggtgatgccttgccctgcttcagctcacactcggtgggctgcacccactgtcctgcctccactgtctgacaagccccagtgagatgaacctggtacctcagttggaaatggagaaatcacccatcttctgcgtcactcacactgggagctgtagactgcagctgttcctattcggccatcttggaactgcctcccattttgatctttacccacacagataattgtgacgtatttctaggactctcacctaaataaagttatccttttacctgggctctcctctcaggggttattgcaaggtattgctggacgtaaagcctaggtgatgtgactcttctagactgcttagcctttgctcaatacaaaattgtaatgtttcaatggatccaagacctaaatgatgtgactatcatctcttgcctgagccctgaatacattgtgttttgtgacactgtgactctcttgcatgggccctgccaacagaaggcattatgacatatctctggctgcatcaattatttgatgtgactctgctgttttacctggacattgcccatagaagagattgtgacatatctctgggccaaatagctaggtgttggtgactctcctcttttgcctgtgccaggctcccagaaggaataatgaattatcactaggcccagcacaaatgcaatgtcattcttctgcctgattattgtccacaagggccactgtgacatatctctgggcccatgacctaggtgatgtgattctcattttctttctgggacttgtccacagtgaaaattgtgacatatttcttgctgtagcacctacattatattactctctactcttgcctgagccctgcctactggtgtgattgtgacagataagtgggcactgaccttatgttatgtgattcttatctttttttctagctgtatttaccagggacattgttacatatttcttgttccctcaccaaggtgatgtgacacctctgcctaagcctttctctcaggaagtattgtggcaaattgttgtacctggcacctaagtaatgtgacccttctctacttcttgggctctgctgaaggaggcattgtgatgtatccctggacacagggcctaagggatgttactctcctctcctgcctgggcccggcatacattgtgtgttgtaatatatggctgcacccaacaagtacgtgatgcaactctactctacggtccctgaagacaggggtattatatgatactgtttgttcatcacctaggagatatgacacatttttgttgcctgggacctgccaaataagaagattgtgacatatcacttgatccatcatctaggtgatatgagtctctctctctctctttttttttttttgcctggtccccacatgttttgggtattgtgacatatcgctgggcccaatacctagaaatggaacgctcctggctggggcctgtccacagtggacctggtgacatatttctgcatttatcacctaagcaatgtggctctcttcttctgcctgcaccctgcctacagggaagattgtgacatgttgctggcctcagcaaacagatgataagtctctcctaattgagtcttgcccacagaaagcattttgacacatcgctgggcccattaacaaggtgatgtggttctgcagtctacatcctgcatccagctttcaggaggggattgtgattgtaacatattcctggctaagtacccaggtgatattattcctctgcctggtcccttctgtcagggaagattgtgacatattcctggaccagaacataggcgatgcgactctcctgtttgctccctacccacaggtagggacatatatcttggtccagctaacagttgcaatgatgactctaataccacacaccagccaacagaaaatatactgtctgttttagctgaggttagagacacgggtaaaatcccatgtctcctctttgtatgaaggttatagaaaattaccactttctcacacattgtataaagccctagtgtggaacaaaatgtcaccacggaacccagcattcaaatgagattgtgtttctcatattctcaccctaccatccattaggattttcacccttacacgtggacagagcccacaggtgaggtcctgaatcacacaggttgacacagtccacagctggaattgtttctctcatttgctaagttgggatggtgactcatttccaaacctagttcacttctgtttggactgagccaattgaagagaagttgactctgagacaagcggttagggtaaaaattataaccatgggtccataccagaagggaggtctcaaagcatattgaggctctcatgcataaagccctcaggtgctacaaagtgtttcctgacaaggcacagcacaggtgagattttgacactggtatgcacatcatactgccacatgaacacagccaacttttgaggttctgaatgtcacatttggaggcagtcgaaacttgaaaaagtgactcttatatgtggatccagtccacaggtgggctggtgactctccgtccaagattcagcacacctgtgaggctgtgactctactaaggaggcatagtgcacagaagaaagcgaggttcccacgcacagacctagtccaccattaagattgtgactcatgtatttagacccaacatagaggagatgttgactcccatacttagaattgggtcatgtgcaagaactttaactttatccctgtatctttctgcatgtgagactgtgtgacatatgcctctgtccagcaactgagtgatttaacacttctgccttggcccaacccacagatggaattttgacatattgctaaacccagcaccttcatcatgggactctattccactgccttggcactgcccatagacagcattgtgacatatcactgtcactaggccttatattcagttaatgtcagtctcctcttctgttttgtcactgtgcacagaaggcattgtgacgttgggccccacacccaagttatgtgattctcctacctgtaccctgcccacacggcccattgtgatatgttgcttggtccagaacccaggtgatgtaactctcttgccttggcccttcctacaggaggcattatgacatctctgcacccattagccaggtgatatgactcacttctgcctgatcgctgctcacagggaatattgtgactcatcactgggcccagcattgagttgatgtgactcttctattctttttaggttctgcctgcaggagagattgtgatgtgtctctggactcaatagtaaggtgatgctacacttttgccttggtcctgacctcagaaagctttgtgacatattactgggctcagcaacaacatgatatgagtctcttgcttggaccctgcccacagggggcattgtggcatatctctaagttcatgaactatttgatgtgactcttcttgcttatgtgggctttacaattagaagagattgtgacatgtctctgattccagcacctaggtgttgtgactctcctcgtttgcctgtgctatgctcactggatgtaaagtaaatgatcactaggcacgacacacaggcaatgtgattctactgcctggtcattgcccacaggggtcactgcaacatatctctgggcccattacctagatggtgtaattctccttatttttctgcttctgtccccagtagggattgtgacatattccttcacccaacatttatgttatgtgattctcctctcatgtctggactctgaccacttgtaattttgacataaggctgggctcatctgtctaggttatgtgacaggttatgtgactctcttcttttttcctaagccctacctacagggagctttggtacatagctctgggcccctcaccgaaatgatgtaatcctcattcttgggcccttcactcagtaggtattgtgatatattgatggactcagcacctaggtgaggtaactctcttctacttcttgggctctgaccaaggaggtattgtgatgtatcgctgagcccagcacataggtaatgttactctttttgtttatcacttggatgatgtgacacattttatttttctgcctgggccctgctaaaaagggggattacaacatatcatttggctcagcacctatgtgatgtgactcctttcttctaggccccacatatttggtgtattgtgaaataacgctgggtcccacacctagaaaataagaggctcctgcctgggccctgcccacagggggccttgtgacatatatccacatacactacgtaggaaatgtgactcttcttttctgcctggaccctcctaacagaaaagattatgacgtatcactggaccctgcaagaaggtggtgagtctcttttgactgggtcttgaatacatagatcactgtgacatattgctgagcccttagagaagactgtgacatacatctggccccaaacccaggtaatgttactctcctgcttactcctgatctggaggagtgattgtcacatatatcttggcccagctcactggtgtgatgatgactgtcataccttcaacttgccaatgagagagatactgtctcttatagctaagcttaaggaaaaagataagatcctgggtgtcctttttgtacaaaagtcacagaggtttaccactctctaaagtcctctagtggtacagagagtgtcaccacaggtccaaggacacaggagatattgtatttctggtatacacaccctgccaatccttaagatagtcatcctcacacatggacacaacccactggtgagatcctgaatctcatacgtagacacagtctacagatggaattgtgtcagtcatatgtgaacatctggacacatatgggatagtgacccatctctaaatccagctcataggcagatgagtactcttctatttagacacagccaattggggaggtgttgactctcatacctgagcttagaatgacaggtacaatcatgggcccatatcagcatgaaggtcttaatgcagattgcaactcacatgcatatcatattgtattacttcattttcacactgctataaagaactgcccaagaccaggtaatttatgtagaaaagaggtttaattaactcacagttccacatggctggggaggcctcagaaaacttacatttatggcagaagaggaagcagggaccttcttcaacaggtggcagcagggagaaagtgaatgaagaaggaacttccaacatttataaaaccatcagatctcctgagaactcactcactatcacgaaaacagcatggaggaaactgccccatgatccagttaccttcctgctttgacacgtggagattacaattgtagatgagatttgggtgaggacatagagccaaaccatgtatctcataaattctttgggtggtacagagagtgtactaatagcctagctgaaaggtaagattgtgacagtagtaagcagacacagtcaagagtaaagattgttgtcctctcacatgagcatggcccactgttgaggatttgaatcttatatctagaggcagtcaaaagttgcaatgttgactctcattcatgaattcgttatgcatggattttgtgacccttaaaccataatttagcacacgtgtcaggctgtgacttttctaaggggacacaatgcccagaaaacattgagaagctgctgcacagatccagttcacagttgaggttgtgacttgtctactttacccatcatacaagacatgtggactctcatacctagaaccagaacatgtgagggattggtaatttcatccctgtattttttgaaggtctgattgtgacatacacctctgccaaacacctgatttgactctcctgcctggcttggttcacgggtagaattgtgatatattgctggacccagcacccaggtgagatgactctattctcaagccttggtgcctcttacaggaggcactgtgacatatcgctgggatttgcagtcaggtaatgtaaattttctctcctaccttggtgctgccaataaggggcattgtgtcatattgctcattttaacacccaggtgatgtgactcttctgcctgggtccagcctaaaggggggattgtgacatctctctgcactcatcacccaggtaatgtactctcatctcttgcctggtttctgttcacaggagggaaggtgacatatctctgagctcagcacctagctaatgtgacacttctcttcttcctaggttctgcccacaagggagattgttacatatatgctgggcccagctttaagatgttactcattagccttgtccctgccttcagaaggcattgtgacctattgtgggacccaggaccaaggtgatgtcactttcttgccttgactctgtcaagaggaaacatcgtgacgtatctctgggtccataaaatatttgatgtatctttctgttcttaccagggttttgcttatagaaaagcttgttgcatatctctgtgcccagcatctcagtgatgtgactccctctcctgcctgggccatgtccacagatgaaaaactggcttatccctggggcccagcacacaggcaatctgatttatttctcctactctctttctgcagggggcattgtgaagtatctcttagcccatcaactatttgatgtaaatctcttctattacctggggctttgcccataggggaggttgtaacatatctcatggcccagaatgtaggagatgacactctgctctgattgttaatattgctttgctcaccacttacttgatatgactctcctctcatgcattgtccctgccccttcgggtgattgtgacatatagctggctgtagcccctaggttatgtaactttcctcttcttcctgagccctacccacagaaggcattgtgctgtatctctggggctctcacctaggtgatgtggctctcctgctttggtcttcctctcagaaagtattgcgatgtattgctggacctagaacctagatgatgtggctctcctctactgtttggtctctgaccaaaaagagattgtgatgtatcactaggccagcatctaagtgttgtggctctctgctctctcctaggcactgcatacattgcgtatggtgacacatggctggatccaaaaccaaaataatgcaactcttttgcattggcaacgtccacaggtgtattaccacatatcttttcctttagctctgaaattgagctctgaaataatatggattttttatctttgtgcccatctctcctgttgagtttaaactttaatccagggctgggcacggtggctcacgcctgtgatcccagcactttgggaggcccaggtgggtggatcatgaggtcaggagattgagaccatcctggctaacatggtgaaaccccgtctctactaaaaatacaaataattagcctggcgtggtggtgggcgcctgtagtcccagctactcgggaggctgaggcaggagaatggcgtgaacccgggaggcggagcctgcagggagccgagatggcgccactgcactccagcctgggcgaaagagctagactccatctcaaaaaattaattaattaattaattaaataaaataaactgtaatccaaagccatgaaaatagtcataattactgtcacaaagtgataacttttttctcctcctccttcttttctcttcctcctttgcatctcctcctttccttttcctctcttcctcctcctctcatccttctcctcctctcctcctcatctcttcttcctccactcttcatgttctcctcctcttctttttctcctttctcccctccttttcttcctctcctcctcttccacttctcctctttcttcctcctcctctccttttcttcctctcatatttctcccctcctcctcttccacctcctactctccttcacttctcttcgtttcatcctcctctcttcctcctcctctttctcctctccttctctcctcctcactttttcctcctcttcctcttctctttctcctcctcctctcctccttctcctcatgtcctccttctcctcctcctctcctccttttcctcctctcctccttctcctcctcctctcctcctcctcctctcctccttctcctccttctctcttctcctctcctcctcctctcctcatctcttcctctccattttctcttccttcccctctcctcctcctctgccttctcctcttcttctcctttcctcttatttttctcctcctcatcctctcattctcctcctcctccactacttttctcctatttctcctctcctccactgctcttcctctccatttcctcctcctctccttctttttcttctctcctcctgctcctctttctacttttctcctcctccttctcctctcctcctgctactcctcttctccttttctccttctccttctcctctcctcctcctacttctccttctcctgtcctattcctcctctcctcctccttccccaaaactctcctcctccttctccactcctcctcctagtactcatcttttactccccatcctctcctcatctcctcctcctctcctctccttatttttctcctcctccttctcctgtcctcttccttcttctctcctctttcccctctttttacttctcctctcctcattcttttctcctcctccttctcttctcctcttccttctcttctcctcctccttctcttcttttcttctctcctcttcctcctccttttattctcttctccttttcctctcctcctcttccttcttctcctctttcttctttccctcttttcctcctccttcttctttttctcttttcctcctccttctactccttctactctccttctcctctcttcctcctcctcctctccttttcctcctctccttctcctcctcctcctcttccactgctcctccttctcttctccttcccctctcctcctctttctcctttccttctgttcttttaatctcctcctcctctcctcctccttctcctctcctctttattctacgctccccctccttcacctcttgtcttcctccttctcatcttttactcctctttctcttctacttcttctcctctcctcctctcctttccttttctttctcctgctccttctcctctcctcctcttcttctctcctctttctccttttttcctcctttccttctcctctcctccttcgcctcttctccttctcctactcatcttttactccttcctcttcttcttttcctctcctccgttccttttctttctccctttcctccttctcctctcctcctcttcttctctcatctttctccttcttttttctcctatccctctcctctcatcctctgccttctctcatctttctccttcttttttctcctatccctctcctctcatcctctgccttctctcttcctcctctgctttctcctctcttcctcctccttctctcttcctcctttttctcatctcctcttccttctcctttcctcctccttctctttcttcccctccttcccctctcttcctcttctcctcctcctatcctccttctcctcctccttcactcctactcgtgttcctctcttcctcctttcctcctcctccttcttgttctctccttctcctttttctctcctcttcctcctcctcctctcctctttctctccttctcttctcctttttcattcctctttctttctactcctctcttcttctctctcttctcctcctccatctcctctccccctccttttcctccatttcctcttccttccccactcctcctccttctcctcttcttttcctcttccttctactccttcttctactctcctcctcctctgcctctcctccttctcttctcctctcctcctccttcttcactcctccttctcctctcttcctctttttcttccttctctcttttttcgtacttctcctctcctcctccttcttaactcctccttctcctctcttctttttcttccttctcttttttgtacttcttctgcattccccctcctctcctttttctcctcctcacctactttttctgctctcctccttctactccttcttctcctcttctcctccacttcttcttttactccttctctttttcctcctgcaccttctcctctcctcctcccctccttttccttctttttccctcctttttctctcctcctccttttccatttctcctctcccatcctcctcctccacttctcctcttgtccttctcttctccttcttctcctcttttcctcttcctccttctcctctcctcttccacttcgtttttctcctctcctgctcctcttcattttcccctccacctccttttcttcttcttctcctcctcctctcctcttgctccttctcgttcttcccccctttttcttttcccttcctcctcctcctctccttctcctttttactccactccaccaccttttctcctcctcctctattttccatctcctctcttccttttcctcttctttttctcctcttcttcctctctcctttttctgtctcctcctcctttcctcgtcctcccctcctttttctcttttctttctcctcctctccttctcctcttcctcctcccttctccctcctctccttttcctctcctccttctcctttcttcctccttttctcctccttttccgtctcctctcctcctcctcctcttctcctcccctcctcttctccacctttttctctcccttcttctcctctccatcttctcttcctctcttacttttcctttctttcctctttcttcttctgctgtcctcctccttctcctcctatatttctcctctcctcctgttcctcctcttcctctcctcctccctttttccctctcctctttctcctcctccttttttcttctctcttttggcttctctcctccttcttccctccttctcctcttcctcctcattttcctcttctccttcttctcctcatcctcctctcctcctcctttcctccttcccctcctcctcttcctcctactctcttcccccctttctcctcttcttttctttttctcctactttcctccttctcctcaatcttttcctcctttttagctcctctacttctctctctcttctcctcgtcctccttctctcttcctcctctcctcatactccttttcctctcctccttctcctcctcctctactcctttttctcttcatctcctccttttcctttttctctcctcttcctctcctcatcctccttttccttttttctctcctcttcctcccatcctctttttccttcttctcttatcctccttctccttctctttttctccccttctctttctcctccttctcttctcctctcatcctcatttcctcctcctcttttcctccttctctttttctcctcttctcctcctcttctaattctccttttctttctcctctaatcctcctcattctcctttttttctactcctccttctcttctcctcctcctctccttttttctcctcattcttttcatctcctccttctctttcatcttctcttcctccttctcctcctcctcttcctcctccttttctattccttctcctctcctcctaaatttcctttttcttttcttccatccctttcttcctccttttttcttctcttcttctcctcttcatctcctactcctcctatttttctcctcctctcctttctttttctcccctcctctttcttttctcctccttcttctctatttctcctttcctcctcctctccttcacctcttcatctcctcctccttctgctccccattctccttctctcctcctttttctcttcgtcttctcctccttcttcttgtccccccctccttctccatctcctctactcctcttctcctcctcctcttcttctcctcctgtcctcctccttctctccttcttttcctcctttcctccttttttctcctcctctccttctcctccttctttttcctcattctcttattcttctcctccttctccttctctctctttttaatctacttcctcctagcttcccttttttcctctcctctcctggtcctgttgtcctcctctctttttttttctccacttcctctcttcttcctatcttcttctccttttctcttctagttcttctctttcctcctccttttcttctcttctcctcctcctctttcttcactcctccactcctactcctcctcttactgagccattagccatgccaagcagcatccagcacacgtagtggcagcctcttcagcgctgcactagaaagacctgatgtacatttatattagcttttggaggatagtattaatccagcctaactcaggcggccaagtatatatatgtaatctatctatctatctatctatctatctatctatctatctatcatctattctatgagaaagaatcttgctctgtcacctaggctggagtgcagtggcacaagattatgattcactgtgtcctcaagagatcctctcacctcagcctcccgagtagctgggactacaggtgtggcccatcacacctgactaatttttttttcagtgaccgggtctcaacatgttgcctagactggtctgaaacttctgggcgcaagcgctccctctgtcttggcctcccggaatactggggtgaatttatttcttacagaaccgccctgattcagatggtgcaagcctcgcaggccagaaacatcttcctgacgctgctccccaccttctgccctctctttcccagcatccttcccctgtggaaagagaaactttccttctaaggtctttccagcccctccctggcagggaagcctggaaactagggcccctgctttcccctgcagtcgcaaagcatctgggtgctggccaggaggtggcctcctggggtgctctcaccagggtgtttggtggaagcccctgacgcaccctgctctgtggatttgatcttcctgggcagaggacactggcttcgagggggcagcaggcagccctgcgccctggccctttcctggctggcggttttggtgtggctgactacctaccaccttgggcgcccaggaaagaagggggccagggcctggccatgggggcgcctatcggtccttgcccttccgttggctaagtgcgtgttttacagagatccgtcggtgtggattgcaccttccttgttttacagggatccgtcgatgtggagtgcaccttccttgcagtcgggggctcggtgccgggtgccgtcgttagtccaggaagaaggcggggagcttctcccgctcgaacaatttgcagctagttccggggcttcccttcctcctcccacaccggcccgcatcctagtgttgctttctctgcccccagcaccagcctcttcttgggctccctcctccccttcccactcgcgtctcttaggaaactgcgaccctagtgtttgctaaggagcaggggaggtccttcccgtcgccgacgccccccgcccggaaagcggcgcgttttctgggccgagggcgcatcgaggatgtgacccattccctggccaagggtgtgggtggggaacggcaaccgatctcactgcctggcggggcagcttcctttccaggcaaggcggagacctgcagggcgtggagaccccgcccggcgcagaacgcgctggccagtgggcagcttgacagggtccccgtgtgcctagcgaccctcttcagcgctgcatccatgagaggttataaatgaggcggaaagaatttttccctgctcagcggatttgtcctttttctctcctgactggataggagatagaacacagatacagcccagatccggggcagcagttcacactccattacaaaactctacacagcttccgagctagcagcagcacacattcagggaacattggagggattttcttcttcttttgtgggtggtaatgttggtggttgtggagagagatagaagagtgaataagaaaagtataacgatttggtaggctgaaaaacctgtctgggattttcattaatagaaaattgaactcttgtccttgtttaagagttcagatttaagcttagccctttcaaagtcaatggaaacaaagtttgccttttagataggaatgctgaaaataatgagacacttctgtctggaggaaacaaaatgatttctgcaaaggcagagtcgccagtccatccccatatatttgagggttttttccttttttagatatgtgtggtctctgcacctatgcacaatgttactgaagtatatttaatagaagtggaaagtgagggaaagggaattgcaaatagaagaatgtgattttgttttcatttttttcatacctgtgaaaagcattctctagatttgatgctttttcaagtaggcagtatagtttctaaaccctattttaatcagggagtctgttagagaccacaatcttggctaaaacctctttggaaacacacacacacacaaatgcttaattctgtgctaccttcaagagttggcagaatttttgcaggaatgagtatgagttccttctaaaggatcttgtgctccattttaggtaaatgaagttgccctatcttattttattttattttattttattttattttattttatattttattttattttattttattttattttatttatttttgcgacggagttttgctcttgttgcccaggctggagtgcaatggcacgatcttggctgactgcaacctccgcctcccaggttcgagtgattctcctgtctcagatttcccagtagctgggattacaggcatgcaccaccaagccctgctgatttttgtatttttagtagagacagggtttctccatgttggtcaggctggtcttgaactcccgacctcaggtgatccgcccacctcggccacccaaagtgctggtattgcaggcatgggccaccgtgcccagcccttatcattcttaaaaatactgctaaactggttgcatattaggatatctcatttttaaagggtttgctggatgtgcgagacttttaagaagtgctactgatgcttatggatatatggaatatcattctctggggttttctatataccactttatttctcatcagaaattcagactcaaagcccttagcgtgccagacacgagtttgttatgtgatggttaacacgcatttcactgagctggtacaggtgatacattcatacctaacttgttacaccatctaagtgaccgtttgatgaaagggtcttttattttaagtttattcaggcagacttttgaggtcttatttgcatctggcaaaggtacagcatgttgaaggagaaaaaataaaccttaccttattattcctgcattagatcaatagctgtttattggccacctggtctgtgccaggcactgtacaacatgggtgacctagtaataaatggatggtaataaatgtagttgccagccggtcatggtggcttgcacctgtaatctcagcactttgggaggcctaggcgagtggatcacttgaggtcaggagatcaagaccagcctgaccaacatggtgaaaccccatttctactaaaaatacaaaattagccgtgcttcttggctcatgcctgtaatcccagctactcgggaggctgaggcaggagaatcacttgaacccgggaggcagagattgcagtgagctgagattacagcactacactcaataaataaatgaataaacattgttgccctacatcaggagtcctcaacacccagggcacagactgataccagtctgtggtctgttataaaccaaaccgcacagcaggaggtgagcagtggatgagcgaggcttcatcaggattcacagccactccccatcactcgcattacaaatcagcagcagcattagattatcgtaggagtgcagaccctattgtgaactgcgcacgtgagggatgtaggttgtacactatttacgagaatctaacgcctaaggatctctcactgtctgtcatcacccctagatgggaacctttagttgcaggaaaacaatcccatggctctcactgattctacgttatggtgagctgtataattatttcattatatattataatgtaataatagaaacaaagtgcacagtaagtgtaatgcgcttaaatcataccaatagaaaaccatcttgccacatccgtgaaaaaattgtctgtcacaaaaccagaccctggtgccaacagggttgaggagcactgccctacattgtacagtgcctgacatacaccaggtagccaaaaaaattcttagtggggttaattagagcttttaaaaactgtatttgtctttccctagcttgctttgtattttctcttttttccgtgttctcagagacaatggggtaggactatataaatgtgtgatatttctggtagtttaattactttaaaatgttctttattcattttgatgtaccttcttggactaagttattttcaccctgcttctttgaaatcattcaggaaagattccatgtttatactcagaacaacactattagggttgggtgggtatgttgacccattttatagctgctttatgaggtacccagtggctggcaataaattaagctcagcatccacaattcctaactaccatctagctccatggaacacctgctttatagagtcagcttgatctcaaaaaaaaaaaaaatcatagatttaaatgtatactgcttatttacctctgtgtatgtgtgttgttatttttaataaagacctttttttttcaaaataaatttgattgaatttgaaggtataagggaatttcaaatgaaactttagcctctggtgacgttgccattgatgaatatgatgatagacatcttttcagtagcctttctacctcatgggattgttgtaaagataaataaatgttccagaaactcaaaacctacatatggaataaagtggtttattttgagatcaggaagttttgtgggtatccactgtggatttcctttccagaattttgaatttttgagtgatttgctttggggaagggtgctactggccttaagtatacagacactagaaatgctgctcagcatattacaatgcacaggatagccacaaatgtcagcagagctgaagtcaagcaagcctgcttgagaggtgtagtagtggcctttattgcatccacaagcacagtgggtgcattccctgtattgcatgtgctatatttagaaatctgaaattccataaagtaagtaagcttttatttgcctctaagatgccatggttggcaaggtcaaagttttacaagaagcttgggattgaggaaaacattaagtggtattcagtgtatttgaaaactccatagtaaataagagctctagaactcatcagcttcttcaacaaatgagatgcattggctctgtaaagttgttttggtaggtggctcctacctgagttatttaggaaattcgctctgatgctgtcatctgccagtctccctcatgttttcagttacgtggagtatatcttttaaaaaaattctttgaactagctcttactagcttgatagttaatgtttttgcattcatagtctcccttattttaatttctcaagtttttgcaaaattcttacataactatctgcccttttcatagactggtgtttctgagccaggtcttctgtccacacatgtcgtcttgagagagtggatgttagccagctgccctggctgagatggatggggacaatacagggatgcaataaaggagacagtgataatttatatgatctgggaccccaggcctcacaccagaactgtctagtatatgtttagcaaataagtgccactgatttgacctttgtcctgcccttccactttccaccctactacacaagcaggaaatatgcacgagataaggcaggaagatgaggagactgaattccagaaaagaaagggctgcctgcagtaagcagacagttgcctccacagtggtctgggctcccacttaccttagagacatgtgcaacacttgagaatagttgttttaaaattctgaaatcagtggacagactgtaagcatcccattgcagtcagttgccaggtacctgttctctgcagcaacctttcacctcccatacttgggagtgagttctgttcctgcagagtgccctgtgcattctggtgcttttgtgccctctcctttaacctataaactgacaactctaactctacattttcacttacaatttttctgaagcagtaatcttttgtgatcctgatcacactacaagtccctcaccctgcaagtacttgtaaaaatgaaagtaatgtccattccttctggaaggtgattgccatgcacacaacctactaggccaggaacattactgatggctgtcctgatgcatgtctctctcacccccatgtccaatcagtcaccaggctctcctcaaaaccatgcttcagtcactgactttggctgtttaatcacttctgacctaaggccctcattgagtcataagcacctcttaattttctgccaccagtttctctctactgctgttaatcttccagcttgctgccagagtcatcatcctcaaaaacaaaagctgctgtcattgtttgcctgcctaataacatctcttgcctccctgctgtctgcaaaaagaaaaatccaaactccttcacttgttttacgaagacccatatctgcttccaaaccaaattgctagtcttggctcttgtctctgtcttccacatcactgacacactgaataattctttactgcccctgctgttgcatgggttgttctttttgttgtgtctccatccccttcccccagcaaagaatatttactctttactcttcgttgagacccatctcaaatagtaccttttctagggagaattaggccttctgttcctaataacttttaccctcgtctatcaagtctgtctgctgtaatttatctgttaacatgtttctcctacctcaaggatattttttccatcttctgtacctagcacaattgcatggctgatgctcactgactactgcatgttgatttacttattttattttacttgtttgagagatggagtcttgctctgttgcccaggctggagtgcagtggtgcaatgtaggctcactacagtctctgtctccctgtttcaagcaattctcctgcctcagcctccccagtagctcagattacaggcacccaccaccacgtccagctaatttttatatttttagtagagacaggtttcaccacattggtcaggctgggaaatgaagggatgggccaaattaaaggaataggttgggctaattaactgcagcaggagcatgtccttaaggcatagatcactcatgctattgtttgtggcttaagaatgcctttaagtggttttctgccctgggcgggccaggtgctccttgccctcattctgctaaacacacaaccttccagtgtgggtgttatggccatcatgaacatgtcacagtgctgcagagattttgtttatggccaatttcagggccagtttatggacagattttggggggcttgttcccaaaaactgtaaatgaagtaattaaaatggccagccaggagtggcggctcatctctgtaatcccagcactttgggaggctgaggcaggtgaatcacctgaggtcaggactttgagactagcctgggcaacatgccacaactgtatctctataaaaaattttaaaaaatagctagatgtaatggtgcgcacctatggtcctagctactcgggaggctgagataaaaagatggtttgatcctggaaggtggaggttgcagtgagccaagattgttccactgccctccagcctgggtgacagattaaaacccatttcaaaaagaaaattaagataaaaattaaaaatgtgtgggaaaaaagatggaaagacaaacacaatataataaaacctgtgagataaagcaaatataatactaagagggcagtttacagcctaaatgactgcatcaaaaaagtagaaagcttacatattgagcacctgacatcacacactcttcaaggaactagaaaattaataataaacaaaattccaagttagaagaaaaaaataacaaaaatcagaacagaaccaaatgaaatagagatgaaaaacaataaaaatgatcaacagaatagagttggttttccaaaaagacaaaatgggtaaattgctaggtagattaaccacaaacagaatgaaaatctaaataaacaaaatcagttatgaaagaagacattacaatggatacaacagtaatacaaaagttcactagaaatgattataaacatctagacactaataaacctgaaaacctaaaaagaatgaataaattcatgaaaacatacaacctcccaagatagagccaggaagaaatagagtacctgaacaaaccagtaatgagtagcatgattgagtcagtaataaaaagtatctcgacaaagaaaagctcaggactggataaacgcacagccaaattctaccaaatatacaaagaataataatcctccttaaactcttcccaaaaattgaagataattaaattctccctaagtcactctgaggtcagtatcaccctgataccaaaactagccaaggacacaacaaagaaaactattattatattattattataaaaaatagacaaatgggacacaaaagagtttttgcacagtaaaaaaaaaaaaaaaaatcaacaggataaataggcaacctacagaataaaagaatatatttgcaaactatgggccaacatgaaaccaatattcagaatttacaaataactcaaacaattcaaaaatatcataataataagaaatcccattgaaaaatgagcaaatactactaagcatttttcaataaagacatacaaataaccaacacgcatataaaaaacatgctcaatctcaactaaaaataaaactacgatttgattcagaaacctcatcattgggtatctactcaaagaaaattagtttattacatgaaaatgatacctaatatcacctacaaataggcaactgcaaatgaaaacagtgatgaggtatgacttcaaatctgttaaaattactaatatcaaaaagaaaaaatagaggctgggcacggtggctcacgcctgtcatcccagcactttgggatgccaaggcgggaggatcacttacgttcggaaattcaagaccagcctgaccaacattgggaaacaccatctttactaaaaatacaaaattagctggtcatggtggcacatgcctgtaatcccagctactccagaggttgaagtgggagaatctcttgaacccagaggagaatcacttgaacccaggaggggaagatggtggtgagctgagatcatgccattgtactccagcctgggcaacaagagcaaaactctgcctcaaacaaacaaacaaacaaacaaacaaaaacaaaaaggaaagaaagaaaagaaaaaatacagaaatagcaagtaacatctgtcattgatgttcctgagatttctgaaacaaatcttaatgtcaccactgctctcacacacttcagatatgatggaaaaagaaaacttcagaaatgatctaacatgcacttcctcaaaatactcagagatattcttatatccccccttgaagcaatggaagaggaggcatatcatgcagcaccttataagccataaagaggactttagctctcacggtaccttcaaaggaaaatcactaaatagcaagtaacgtccatagagaatttaatggtatgggacaaatgatgctcctatacaaaagctacagaataaaaaatggctttttaggaaacatttccactgaagcagagcatcccataccacattttaaggtctgcaattctttttgacctttgtacctctcgtctgtgttatctgcttcattcatgcttacctgcctgagtatttgaccactgtctcatgtctcttcacattccaggggtcttttatttgctcaaggcaggagatgcgatcaggtttagagacagcaaggcctgttttgttagaaaaaagtaacataacttgctgagattctacagttaccaaccttgtaccatgttcagtagagaggagaaaatatgaaagattctagaaatttaattccaaaatactgttttctgacagaaacttttgaatatttagaacatattttacatttctgggtccttagctctactattcaatattattgaatttaaaattggtgctggatattgaattttaatatttgggcaagaatatttaatgccactgaatttctagaatgaccattaatctagagtgaagaatacagattagctcaagaaaggggaagtttcctgttaaaacatcttgaagattttcttttctgttccagtaaaccttcaagttttccttaaaagtgttgatctaaaaataatttgtgcagaggaaaaactgccaaaatcattctacaaagggagaaaatagaagccttagggtgtattagaaaacctggggaaaatgtattgacaccgagagaccagttttcggcagttctctaacactgcatctctgaacaaatttcactgagcagtattcagacattccacacctcctgagagaattctatggccacagccttgaaagttaacatttcctaaaataaacccaaagacccacacatacttagcaagtggtcataggcagaattattaattttactctaagtgtttgagagttaagagaactggctctgtttcacataagagactggcattatccaataaaatattgttcaatagagaaagattctctaatgtattccttcattctgaggaaagaggatgaaacaagatccacaaaaccagtgtatgtattatagttttctgaatgacacagcataatatttatggcaaaaacacaagcatttacagttttgagtgccatatatacattatacagagtaaggtgtgtacagttctcatatggagaagtcacagtaagttagaagttacctctcgaattttaatgcatacattaataaactggagattttgttaaaatacgtattctaattcaagagatctgggatgagacctgagttactgtattgctaacaaactcaccaatgatgtcaatgattctagcttaagaaaaatactctgtaaaacatctagtaagtgatagaacctgggttttttccccatgtatatgaccagtaaacaaagatgacagccttcattttccaaagcaatgtataaacaaagagaaactattaagaaaaagagtgtaagaaaaatggatgttctgtggtcaaaaataggccatggtaaacgtctggttcagcatgactcagttagtttagagtgcaggtgcaccattctacttattatgtaacctggttgtataagctcatacttggctctgatccactattgagtgaaaagagtacacagacaggtggacaggagggagagggagagtaaagctgctcaccctgtacacagggctcgtgctcaggcttgtgcctagagagaaaaaaaagccatctcaaaaattcccatagttccttgattgtttttccagcaacccaccactcacccacccactcctgttagacctcagattaggctggaacctgacacttggcatgataggggagctttcagagtaaatgtgattgtttatgcacattagtcacctctccaaaatacctattaataatacagtttttaaaaagaaacattatagtgaagaaattcttcagaaaacacgttaaccaagttaataaaattaatgggacagattggtatcaggtgctgatacatataggaggatgcaacatgactctgtgagactactggccaaaaaacataaattataatctgaatctaatcatgaaaaatgtgttttatgtaaagttcaagccacatatgttgcccatgttttgtaatttctagtagtgtatctaaaaactcttttagcattctagaaggcaaatttctttgaattcattcctttaaatatctttctaaattattccaggctattaatttcatccttttaaagtgtgcatttaaaaattatgttcttcatagagctgatggagccctccgatggaacccaaaaggtgcggttttctccctcactgatatctgaggacccagcaccatccccaataagaatgttttatatccccacctgcccaggctgatctgtcaacaaagggaatactctcaatatttcagggtataaattcaaggtattagttgtgatatgtaagaagcctggatggagagaataaagataaggttctgatatatagaagtgaattattttaatgaggtcctttcactgtcacgagaagacaagagaaatgtagttcaaataatcttgttaggcaaaagcatcagaagtagaaatgtaaattattgcaattctaaatacatgacattctagaagaaaatgtggacagaattttgacctgggacacacttacctgacaatcaaccatttcttcctctcttctctgattccttctcaggagagattatctgaacaaatcaccatttcatcttgagactgtgtctttaaaggcatcaggacagactctctgaaggaagcagactgctcctgcaggaccctggagacaccccaaatactgtgagtgccacaactgcagaagtgggaaagggagatcctcctctcctaaacacacaaccccactggagaagctgaaagtctgtttgtgggagaagtttctaactacctggagctgcgtcaagttagagagccaagctgagtgaaatacaggggtgtaggaggcaacaaagaggccctgggagctcgctgaatccccaaggagcccattcctgcctagcaccacagggatccatcaaggggaggacagaggagcagggggtaaaacttccaaggggagaaggacttccctagctgaactttgtaacaatttgaatggggcaagaagacttatggccagaacttgggggaaggcatgaatccggcttgaagacttcacaggcatggaagaactaaagcccttttttttcccgcagctgggagacagaaagcctggggaaattttcaagcccaactcgccctccacctggaaacagactcaggtctgttatgaagggcacagtgagagtgagaccagccctttcgtttgcatgggagctgagtaaggcctgtgactgccagctttcccccacttccctgacaccctgcatgactcagcaaagacagccataatcctcctaggtacacaactccagtgacctgggaatctcacccccatctgccacagcagcttcagcaacaaccacccaaggagactctgaactcaggcatgcctagcaccccccgcacccattggtctttccctaaacaccatggtagcagaagaaaaaggacatataatcttgggagtcctgggttcccacccactgctagtccctttcaacagtactacagctgatgctttctggaaagcactatctcctggcaggaggtctaccagcacaaaaataaagcattaaaccaccaaagctaaggacacccatggagtccattgcacccttagccacctccaccagaacaggcactggtatccatggctgagagactcataaacacttcacatcacaggactctgtgcagacaaccccaagtatcagtctggagctgggaagactcattgggtggctagatccagaagagagacaaccaatcactgtagttcagctcacaggaaaccacatccacaggaaaagggggagagtactacatcaagggaacaccctgagggataaaaaaaaaaaatctgaacaacagttttcagctctagaccttccctctgaaagggactacccaaatgagaaggaaccagaaaagcaaaccaggttgtatgacaaaaggaggtttgtcaacaccccacaaaaaaaaaaaatcacactagctcactggcaatggatccaaaccaagaagaaatccctgatttatctaaaaaaagaattcaggaggttagttcttaagctaatgatggagagacaagagaaaggtgaagcccaatgcaacaaaataaaaaaaaaatcatatgagaagtgaaggaagaaatattcaacaaaatatatagcttaaagaaaaaaaaatcaaaaattcaggcaactttgcacagacttttagaaatacgaaatgctctggaaagtctcagcagtaacaagtagaagaaagaaattcagagttcaaagacaagatatttgaattaaccaaattcaacaaagacaaataaaaaagaataagaaaatatgaacaaagcctccaagaagtctggaattatgttaaatgaccaaacctaagaataatttgtgttcctgaggaagaagacaattctaaaagcttgaaaaatatatttgagggaataatcaaggaaaacttctctggccttgctagggacctagacatgcaaatacaagaagcacaaagaacacctggaaaattcattgcaaagagatcttcgcctaagcacactgtcatcagcttatccaaagtaaagacaaaggaaagaatcttaagagttgtgagacagaagcaccaggtaacctataaaggaaaacctaccagattaacagcagactacttaggagaaaccatacaaactagaagggattggggccccatcttcagcctcctcaaacaaaacaattatgtgccaagaattttgcatccaatgaaactaagcatcatatatgaaggaaagaaacagttgtatttttagtagagaagggggtatctccatgttgatcaggttggtctcaaactcctgaccccaggtgatccacccgccttagcctcccaaagtgctggcattataggagtgagtcactgtgcccagcccagaaactctttaaagcataaatcaaacaagacttataaaataaaaatacaagttaaaaaaaaatacccgatgcagtggctcacacctgtaattccagtaagcactttgagagactgaggtgggtggatcacaaggtcaggagttcgagaccaccctatctgatatggtgacaccctgtctgtactaaatatacaaaaattagcccggtgtagtggtgagcacctgtagtaccagctactcaggaggctgaggcaggagaatcacttgaacctggaagacggatgttgcagtgagccaagatcgagccactgcactccaccatgggtgacagagcagactccattccaaaacaacaacaacaacaacagcaacaacaaaacaccaaagtatgcagccaacaaagatcatgatgaatgcaatggtacctcatatttcaatactaacattgaatgtaaatgacctaaatgctccacttaaaagacacagaacggcagaatggataagaactcaccaactatctgccatcttcaggagactcacctaacataaagactcaaataaagtaaaggggtgtaaaaaggcatttcatgcagatggacaccaaatgtaagcaggggtagctatgcttatatcagacaaaacaaactttaaagcaactgtggttaaaagagacaaagaaggacattatataacggtaaatggcctgacccaacaggaaaacatcacaatcctaaacatatatgcaatcctaaatatacaaacatcacactggagctccaaaatttatagaacaattactaatagacagaagaaatgagatagacaccaacatcataatagtgggggacttcaatactccactgacagcactacacaggtcatcaagacagaaagtcaacaaagaaacaatgaatttaactacaccttggaaaaaatggactaacagatatacacaaaacatttcatccaacaaccatggaacacacattctgctcaatagcgcatggaactttctccaagatagatcatatgataggccataagacaagcctcaataaatttaagaaaattgaaattatttcaagcactctctcagactacagtggaataaaactggaaatcaacacacaaagaaactttcaaaaccatgcaaaaacatggaaattcagtaacctgctcctgaatgagcactggggcaaaaacaaaatcaatatggaaattaaaaacttttctaactgagtgacaataatgacacagcctttcaaaacctctgggatacaggaaaggtggtgctaagaggaaagttcatagccctaagtgcctacatcagaaagtctgaaagagcagaaacagacaatctaaggtcatacctcaagaaactagagaaaagagaaacaagaacaaaccaaacccaaacccagcagaaaaaaaggaaataaccaagatcagaaaagaactaaatgaaattgaaacaaaaaaaaatacaaaaggtaaatgaatgagacaaaaagcttctccttaggaaaaatacataaaattgatagaccattagcaagactaagaaagaaaaaaagagaaaatccaaataacctcactgagaaatgaaacaggagatattataactgacaccactgaaacacaaaaaaatcattgaaggctagtataaacacctttacaaaagaactagaaaacctagaagagatacttaaattcctggaaaaatacaactctcctagcttaaatcaggaggaattacataccctgaacagaccaataacaagcagggagattaaaatggtaatttaaaaatcaccaacaaaaaaaagtccaggaccagagaggttcgcaacagaattgtaccagatattcaaagaatcagtactaatacagagaaagaaggaaatctctctaattcatcctatgaagccagcatcaccctaatacccaaaccaggaaaagacacaacctaaaaagaaaactacagaccaatatcattgataaacattgatgctaaaatccttaacaaaaaattagctaattaaatccaacaacatgtcaaaaagataattcactgtgatcaagtggattgcataccaggatgcagggatggtttaacacacacaggtaaaacaatgtgatacaccacataaatagaatttaaaactaaaatcacaagatcatctcaatagattcagaaaaagcatttgacaaaatccagcatcttttatgattaaaactctcagcaaagttggcacacaagggacacagcttgatataataaaagctatctatgacaaacccacagccaacataatactgaatggggaaaagttgaaagcattccctctgagaacgggaacaagacaaggatgcccactctcactactcctcttcaacacaatcctggaagtcctagccaaagcaataagacagaaaataaagggcatccaaatcagtaaacaaaaggtcaaactgcctctgtttgctgatgatataatcatttaccttgaaaaccctaaggactcctgcagaaagctcctagaactgataaaataattcagcaaagtttctggatacaagattaacctacacaaataagtagcccttttgttcaccaacagcaaccaaacggagaattaaatcaagaactcaaccccttttacaataactcaacaaaaataaaatacttaggaacacacctaatgaaggactcaaaagacctctacaaggaaaactacaaagcactgttgaaagaaataatagatgacacaaatggaaacacatcccatgctcatggatgagtagaatcaatattgtgaaaatgaccatactgccaaaagcaatctacaaattcaacacaatccccatcaaaataccaccatcattctgaagatggtgagttagaaaaacagagttggaaaaaacaattctaacattcatatggagcccacatagacaaaggaaggctaagcaaaaaaaaaaaaaaaaaaaaaaaaatgaaggcaccacactacctgatttcaaactatactgtaaggccatagtcaccaaaacagcatagtactggtataaaaacaggcacatagaccaatggaacagagaacccagaaataaacccaaatagttgcagccaactgatcttcaacaaagcaaacaaaaacataaagtggggaaagaacacccttttcaacaaatggtgctggaataattggctagccacatgtaggagaataaaactggatcctcatctctcaccttatacaaaaatcaactcaagatgacttaagaacttaaacctaagacctgaaactgtataaattttggaagataacattggaaaaacccttctaggcattggctaggcaaaaatttcatgacaaaaatccaaaagcaaatgcagtaaaaacaaagataaatagctaagacctaattaaattaaagagcttttcacggcaaaaggaacagtcagcagagcaaacagacaactcacagtgtgggagaaaatcttaacaatctatacatctgacaaaggactaatatccagaatctacaatgaactcaaacaactcagtaaaaaaaaaattcccataaaaaagtgggctcttgattagacaactctcaaaagaagatatacaaatggccaacaaacatagatttaaaaaagctcaacatcactaatgatcagggaaatgcaaatcaaaaccacaatgtaataccatcttattcctgcaagaatggccataatcaaaagatcaataaactgtagatgttggcatggatgaagcaatcaggaaacacttctacactgctggtgggaatgtaaactagtacagccactatagaaaagagtgtagagattccttaaagaactaaaagtagaactaccatttaatcccaccactgggtatctacccacaggaaaagaagtcattatttgaaacatagaacaatgaaacagagaacccaaaaataaacccaaatactgattatagaaaaacatacttaaacattcatgtttctaggagcacaattcacaatttcaaaatcgtggaaccaaacaaaatgcccatcaatcaacgagtagataaagaaggtgtggtgtgtatatgtgtgtgtatatatgtgtgtatatatatatatatgttgggatactactcaaccacaaaaaggaatgaattaacagcatttgcaatgacctggatgagattagagactattattctaagtgaagtaactgaggaatggaaaaccgaacgctgtgtgtcctcgctgatatgtgggaggtaagctatgaggacacaaaggcataagaatgatacaatagactttggggacttggggggaagagtgggaaaaaggagggatagaagacaacatatatggtgcagtgtatactggtcagctgatgggtctatcaggatctcacaaatcactaaagaacttactcatccaaccaagtatcacctgtaccccattaaattatggaacaatgagattttaaaaaaaattattcttataattacagactagctcacataatgaatacttcataaactattacacaggctgggcacagtggctcatgcctgtaatcccagcactttgggaggccaaggtgggtgaatcacctgaggtcagtagtttgagaccagcttgaccaaccctgtctctactaaaaatatgaaacttagttgggcatggtggcaggcacctgtaatcccaggtacttgggaggctgaggtagaagaattgcttgaaaatgtcatgccaaggttgcagtgagccaagatagcaccattgcactcccgcctgggctatacagcaagactccgtctcaaaaaaaaaacaaaaaaaaactattaaacaaacaaacaaacaaaaattatgggtctaacatgagtaatagtcaacttaaaacagagaattttcatggggagattctgaagcataagccaaggattatacagtaataaattcaatacaaagcagacagaatagatttgctttcagcatttttgagaatttctttctagtaaattagacaccttcttaaaatgatttattttgctccaaaattgcttttttctgctaaaaatagtttcaaacttacaataacacaaatacatttactccaaaatttatttacacctaagatttatctttagactaatagatgtatatttaactctgtaaatcaatactaacagtccatatgtgcatgcaagcagaggccacattttacttatgtttctacataattttcattatgaccataaaagtgatcctgcagtcaataacaatttaattgtacatttaaaaataactaaaactagttagttatttgaagaaatgaattgcttgtaatacaaagaataaatgctacaggtaatggataactattttcctctaatatgattacatattgcatgcctgtatcaaaatatgccatatatggcatatgcatatacacatattatgtatccacaaaaattaagaaaaataaatttaaacgtgaaaataagaataaaagtttcacctataggaacaatattctgtaacttattgacaatttaaagccactggcaaaaaagattactagagatttcagtccattatcttaccaaataatatattgttaccatcttttacctacacccttgagtaaggtgtaataggctaaagttagtggcataacacttcaatgaattcatgacagtatttaaactgttaaaaatgtttaaatggaaagttgacataaaatttataatttaaaagtataattaatattattccataaaagtacaattaataagataacatactaacttaaacaaaatttaaaagtttttctttcctaataatgcagattactctgaacacctacctcatacatcactcaatgttataagttaaccacaaagagcctctctacttaaattttcatcatgaatcctacattataatgtccttacccttccatagaaaaggtcataaataacacctacctaaaaaaaagaatctttcgtatcttttattcagcaatgtttagtcacatattttcacatgtgaatacaccaggaatgatgaaacagcatgaagtaatttaagacattaattccattattattcactttttaaaaattccatattttcacaaaaagtatactttgagtgtaattacatctctccaaaatttttttttaaagttatatacaaataatgtttatatgaactttagtctgtattttttatactcagcattctgatttagtataatgtctaaagtttgagtgtcctagatatttctactgtgaatgattccctgatagttacatagaactaactaactttggactgaatatctttcatatttaatgcatctgcaaaaatacattttagtataaactctttggtgttttataatttgcagtttttgaaaaaaatgtttttccaaatttattacattggcagggttttcttcagtataaactccttgatgttgaacaaaattttaacaactgcctcaagattttcctctagtacaaaatgtgtacaatacgatctgtgatacaagcaaagatattacaaccctcttcatattggtaatgctttttcaaaataaatactcttctgcactttatagacatattttctgatagatcttttgatagtaattaaacttttaatgcttttatttagtatgaattctgattttgagtaagatttgagcaggtattaatggcttttttgtcaatatttgtacattggttctcaagtataaatgctttacagtgcaataagatgtgagcattggttagaagcttggccacattgttcacaccgtcaattttctcagcatgaattatcttatctataatcaagcgtgacaatcatttaaaggctttgtcacattcttcacatttctagaatttgttggcaacatgtttttatgtttagaaaagtttgaggtgttgtcaaaagcattgtcttttctttcaggtttgtagagtttctctccaatatgaataatcttatgtctgttaagaattgaggacttttttaggctttccatattattaacacttgtaagatttttctccaatatgacttatctgtagtaataagtgaggactggttaaaggctttgccaaattttttccatttgtagggttgctgtccagtatgaattttcttatgtgtagttagggatgaggatgagaaaaaggctttcccacattcttcacatttgtagggttttactccagtataaactacctcaatgtttattaaaagttgaagataagttaaaagatttgccacattattcatattatcagggtttctctacagtatgaattttcttatggttagtaagaattgaagactggttaaaggttttgccacattcttcacatttgtagggtttctcttcagtatgaattatcttatgtttagttagatttgaggaccatttaaaggctttgccacattcttcacattggtagggtttctctccagtatgaacaattgtatgtttcgtaagatttgagtaacgattaaaagctttgccacattcttcacacttgtaaggtttctctccagtatgaattatcttatggttagtaaggattgaagactggttaaagcttttgccacatttttcacatttgtagggtttctcttcagtatggattatcttatgtttagtaagagttgaggacgagttaaaggctttgccacattcttcacatttgtagggtttctctccagtatgaatcatcttatgtgcagtaagggttgaggattgtctaaaagctttgccatactcttcacatttgtagagtttctctctagtatgcatcctcttatgtatagttagggttgaagatcggctaaatgctttgccacattcttcacatttgtagggtttctctctagtatgaattttcttatattcagtaagggttgaggaccatataaatgctttgccacattcttcacacttgtaaggtttctctccagtatggattatcttatgtgcactaagatttgagaatcgatgaaaagttttgccacatacttcgcatttatagggtttctctgcagtgtgcattctcttatgtttagttagggttgaggaccatacatatgctttgccacattcttcacatttgtagcgtttctctccagtacgaattatcttatgtgtagtaagggttgaggattggctaaaagctttgccacattcttcacatttgtagggtttctctccagcgtgcatcctcttatgtttagttaggtttgaggaccatacatatgctttgccacattctttacatttgtagagtttctcttcagtgtgcatcctcttatatatggttagggttaaggatttgttaaacgttttgccacattcttcacacttataaggtttctctccaatatgaattatcttatgtgtagtaagatttgaggatagactaaaagcttttctatattcttcacatttgtagggtttttcttcagtatgaattttcttatgattagtaagggttgaagaccaattaaagatttttccacgttctttacatttgtaggacttctctgtagtataaatgcttttatgctgggttttgtgtgaaagcatgcaaaatgatttgacacatttttttacatttgaaaggtttccttccagtgtgtcttatgtctgtttgaatttacaaatttataaaagactttcaaacatttaccgcattgaaatactttgctctgggtagttgtgtaacacaggttaagtccattataaccttctttgtgcaccttaagctcatccacactttgagccttttcttaactgtaaattctgatgtccacatttttcatatcttcttggtattactttttgaaaagaatcttccataccctgttctggccaaaggtcttgagcaacatgagaatgtataactgaaaaaaaatttttataaattactccacttactagactcacatgaatatagtttaaaaatcttacctataaatttataccatctacataaataaaatggctttgcaaaataccacaggccctaattctttcacagacatacaaatgtaacaaaaatatagagaccaaaatacatctgtggaaaatttataaatgagttgtgtgcagtgtcccagatgagcacaatgtgaaaaaccacatagaagaaaaagagaagtctgataaatttacccaacacagcttttcctgcttctcactgtaacataatgcctttagaaagggcagcctggccagcatggcgaatccccatctctactaaaactacaaaatttagctgggtgtggaagtgtgtgcctgtaatcctagctactcaggaggctgaggctggagaatcgcttgaacctgggaggtggaggttgcagttagctgaggttgcaccagtacactccagcatgtcgggaggatagagtgaggctctgtctccaaaaaataaaaattaaaaggaaacagtgatgtgccatttacaaacacagtcttacgagataatctgtgaagagttaacaaaaattttgcaggccataagggaactgtgtgatgtagtcataaaaaagttgtgagaaaaagcagctattaagtgagaataataccatcagtgaatctgttctgccaaataaaaatatagaaactttccaaaataaacaagttttaaaaaagtatattggtactgcttatgtcctacatataaagggtgctgaaaatattttactgaaaataacatgattcaaaaaaacaccacataatcatacaaaaataattttctggaaaacatacacaaataaacaaaattagaatttctgagcattatcctagtggtgcaaaaaacatttctaattattctctgaaatttgaaagaaaaaagtatagaaataattataaatatctgttaatgaatatacaacacaaaaagacataactagcaatgtcaatgaaacttgagggaagatgaaaaagaatttttgtatgcaacttatttttttaccagattaaaatatattgttgtatttttcagaggttatatgtaatccccaaagtaccacaaacatattcgtataaatacacaaaagaggttgggtgctgtggttcatgccagtaatcccagcacttcgggaggccgaggcaggtggatcacaaggtcaagagattgagaccaccctggccaacatggtgaaaccccgtctctactaaaaatgcaaaaattagccaggcgtggtggcagatgcttgtagtcccagctactcagaaggctaaggcaggagaatcacttgaacccaggaggcaaaggttgcagtgagccgagatcatgccactgcactcccacctgggtgaaagaacaaaactccatctcagaaaagaaatttaatggttaaaaaagactggaagtagacattccatgcaaacattaatcagaggacagcataaacagtcaaaataatcatacacaagctccatcttaagtcaaaaagtataatattttataaaatgtacttgaaattaaaactccaaagaaacaaagaagaacatcaaaaaataatcgattcattaactgggaacctattacaaatttctctgtgtgtgtgtgagtgtgtgtgtgtgtatgtgtctcacattagtgttccaaatatataaagccaatattgacagaatggaagaaacacaaagaaagcagtattattatagaaagatattttaataccacactttctgtaacaaaaataaaacaagaatgttaataagggaatagactacttaaaggcagtataaaacaattattccgaacagagtgatggagaacattcctcaacaacatcagaatacatacccttctcaatagctcatataacattttccttgatagaccacatcttaggccacaaaggaagtcttaccaacatttttaaaggtaaaattccatgaactactttctatgaccaaaatgatatgagagtatactatgatgagaacaaaaatgaaaaatttacaaatacacagaaattaaacaaaacactcttaagtgtgctcttacacaaaagttgaaatagttaaattgtgaagaggtccattgtgctcaatgcaatttacatatttaatgcaatgttttccaaatttctcattgcatttttgaagaaatagaaacaacaaccccaaaagtatatagaatcccaagagactataaagtgcccaacaatcttcaaaaaaaagaaaaaaatgctggaggcatttaagttcttaattcaaaatacattacaaagctacagaattaaaatgatttgctattagtataaaggtaaaaaagtagacataaaatagaatgcagcacacatataaactttcacatatatggtcatataaggagtcatttacatactcataattattgcagcattgttactgtaagccaacaggtgaaagcaacccaaatttctttcaccaaatcattcagcagatgtaatttgaaatataaaaattgtgaggccaggtgtggtggctcaagcctgtaatcccagcactttgagagggtgaggcgggctgattacctgagactgagagttcaagaccagcctgaccaacatggagaaacctagtctctactaataatacaaaattagcgaggcgtcgagacacatgcttgtaatcccaggtacttggggggatgaggcagtagaatcgcttgaacctgggaggcagaggttgcggtgagccaagatcatgccattacactacagcctgggcaacaagggggaaactccatctaaaaaatgaaatagaaaaacgaaaaaaaattctggaatatcactcagtattcaaaaagaaggaaatattctgccaactataaatataaatcttgattgcattatgcaaaatgaaatgagtcagccacaaaaagagactgtatgagatatatgaaggagttacacttttagaaacaaagaacagagtgatatttgaaaagtgccataaaacagaaaaaactggggccaggcatggtggctcacacctgtaatttcagcactttgggaggccaaggcaggtggatcacctaagctcaggagtttgaaaccagcctggccaacatagcaaaactacgtctactaaaaatgcaaaaattagccaggcatggcagttggcacctgtaatcccagctactcaggaagctgaggcactaaaattgcttgaacctggaaggtggacgttgcagtgagctgagatcgtgccactgctctccagtatgggtgacagagcaagactctggaaaatttggtagacaatggaaaaattagtagttgtttaatatgtattaagatttagctttacaagataaaaatgttttagcaatatgttccatgacaatgtcacgataaactgaatatttaaaaatattttgtggtaaattttgttatgttttattgacaagtaaaaataaacaataatacctaaaagatacatagttatgatagttttaaattatattcaaaaccaaatgtgtttctcccatgcaaaaatcacatatattcacaaattaataggatgttgaaattacaagaatttcatgacttctcatctacacaggattaaaaaactattcacaacaaaccttcacaacaaatatacaagttataaaaaaaaacaaggataacatttttccaggcaaatagagataattctattggaaaagacatatggctaattcatatatgattttgctccacaatgtcttaaattgtacaaagttaaatattggcatgcacaattagaatatatactaaaaaatcaaaacacaattaacagatgtgttgtgacataccctcaaatacatatatatattttatatacaaaaatataaaattgcaaaataaaattaaaacatggaatgtaaaacttattagataccatcaactagatcaatatattcattaaggaagaagaatatgagaaaaaaataatagaggttacttgaagataaaaaagggtgagaactttccacattttgacgtaataaaagaaaaaattctaaccaataatatttgatttaaatttattttactttaaaaagaagatgaaaataaaaaaatccaagataaaggatgagggtgttcatcaccactagcacagttttatgaaaaaatgctacatgggggcaggcactgtgggctcatgactgtaatcttatagttttaggaggccaaggctgtcagaacactagagaccaggagtttcagatcacgctgagtaatccagggagactctgcatataaccaaaaaaatgctaaaatgagtcaattttgtttaaaaataaaatactggacagcatcataaaaccatacataaaacagagcgctctattaaatgcaaatatacaaatatagaactctttactatcataatgatgatgtatacaagtcttaaagctattctgtagagtatttaaaacagaaaaaccggcataaatgttaatatacaatataaaataatttttaatattaataacaaactgaaaaatatagaggtaaaatttttatattcaatttaagttgtcatgagatttaaatatattgttttaattttaagatgtttcatgtaaactccattttttaagatgatatggtttggccatgtcccaactcaagtctcatctttaattcccacatgttgtgggaggaaagtggtggaaggtaattgaatcatgggggcaggtcttttctgtgctgatctcacgacagtaaataagtctcatgaaatctgatggctttataaggcagagttttcctccacaagctctctttcttgtctgccaaccaggtgagacatgcctttcaccttccagcatgattgtaaggtctccccagtcatatgaaactgtaagtccaataaacctctttctgttgtaaattgcccagtctcgggttatatctttatcaccagcatgaaaacagactaatacacaagatggttatgaagacaatatttatagaaactatgcaaaacaaaatgtaaaaaataattgaagcacgtcactacacaattaaaataaaatttaaggcaataaaacaatatattaaaaaacccactgaggaatacataaaacaataacaataaaactaataacttcattttaataaataattttaaatataaattaattaaactacttaatagaaagaaatgtaatctcaggactttcggaggttaaggtgggctaattactggatctcagaagtttgagaccagcctcggcaatgtggcaaaactttgtctcaaccatacatacaaaaaacctagctgggtgtgatgctacacactacctgagaggctacacacaactacctgagaggctgaaatgacagaatcttctgagtttgggaggttgaggcttctgtgagccatgatcacaacactgcaaaccagcctggttgagagtgagacctatctcaaaaataaatgaataaacaagtaattaaatgaaattataaaaagaaaaaataaaatgccttagtggcttaagaaaaagccacctacaagggactcattttagcactgagttaaataggctgaaaaccacatggtgaaaaaaaaatttattttatgaaaatagtaactacaattgggtattagacataatatcctttaagtcaagtgctaacgtgagacaaacattgatagtatatattagtaaaatgaattgatttaccacaaatctataactattctttctttcttttcttctttccttctttccttctttttctttctttttctttctttctttctttctttgtttctttctttcctttctttatgtatgtgtatatataacatcaggctccaaaatatataaagcaaatattaacaaaagtaaagcaaaaaatacatagcaacataataattgtagacatcaagaccccattttccatcatagaaaactcacatagaaaaatcaattaaaaaacagaaaacctagacaacattatagactgtattattttgcatatagaggaatacttgagagtggataatttataaagaaataatgacttcaccatttctgcacatataaatacagataaatatttaatagggggataatgcctcctagaaaatgggtgaaaatatttacaaatcatatgtgataggagtcaatattcaaaaaatataaacaacttttaaaaccgaacaatagccaggtgcggtggctcacatctgtaatcccagcgctttgaaaggccgaggcaggcagatcacgaggtcaggtgttcaagaccagcctgatcaacatggcaaaactccatctctactaaaaatacaaaagttagccaggtgtggtggcatgcgcctgttatcccagctactcaggtgactgaggtgggagaatcacttgaaaccgggaggtggaggttacagcctaggcgacagagcaatactccatctcaaaacaaacaaacaaaacaataaagttgaataactttatttagaaataggccaataattgaaataaattttcatcaaaacatttgaaaggacacacaaaactaatttgtagagaaatgcataaaaatcacaatgaatgaaaaacaaaatcccctcacactcatttaaatggccactatcaattttttaaaaacaccaaacctgtcgatgatgcaataaaaatgaaacccttggccgcgcgtggtggctcaagcctgtaatcccagcactttgggaggccgaggcgggcaaatcatgagtcaggagttcaagaccagcctcaccaacatggtgaaaccccatcactgctaaaaatacaaagttagttgggttgattgtcggtggaaaataaggatgcacccattattttataacgttataaatgtacttcaaataattaaaaataaattatcaaatacagcaattccatttatgaatctatatctaaaatatgcaacataggaccttgaagacatgttcgatacaatgaaatattattcagccttaaaaaaaaatcttctcacatttaaagatacactctgagaatattatgtcaactgaaataagccataatgaaatgatggatgttatgatttcacttatttaagacatataaaatagtctcattcataaaaacagagtgtggaagggcggttctcaagggatggagagagtgtaaaatggataaacgttatttaatgatactgagttttagttttacaagatgtaaaatttcaagaagtcttttgcataacaatgtgaatatacatgacatgcctaaaatatacattttgtttttgtttttgttttcagactgggtctcaatctgtcacccaagattgtgtgcaatggcgcaattatggctcactgcagcctcagattcccagggtcaaataatcctgcccctcaatctctcaagtagctgggaccacaggtgcacaccaccgtgcctagctatttcttagaaaaaaaatattattagagagggtgtctccatattttgccgaggctggtctcaaacttttgggttcaagaaatccccctgtccttgcctctcaaaatcctggttttacagatgtgagccaccaccatgcctggccctgacatgtacatttaaatagatttaagaaggtaaattatgttatgtgtttttacaacatttttttttttaaaactggaaaaaatacagaattataaatctttttaaaaattaccttcggatcacaaaagtgtttctctcacacaaaggaaatacatattcatcattaaacacatggtgaaaataagactatttccaaggccactcacttagaaaagataaaaccaacattgaaaatgagctaagaggcagggcaaggtggctcatgcctgtaatcccagcatttttggtggccaacgtgggcagatcatctgagatcagaaattccagaccagcatgacaaacatggagaaagcccatctttactaaaaaaaaaaaaaaaatacaaaagtatctgggtgtggtggcatatacctgtaatcccagctactaaggagcctgaggcaggagaatcacttgaaccagggaggcggaggttgcagtgagacgagatcctgcattgcactccaggctcagcaacaagagcaaaactccatttccaaaaaaaaaaaagaaagaaaatgagctaagaatgtatgaatgtatacaagataaggtatagccaaaattggggtcatatttgcagataaaaacacacacatatatataatttgattgtgatacacatggctcatttatcttttaattaaaacttacattaacttaaagtatacaaacaactgctaattgtctaaaattataatacttaaataatagcaatagacacaataaactgatgttaacaaacttacactaaaaagcacactaactgcaagtacaactgcaagacaataataacagaaatgcttagtcataaaatctagttggcaacattaatgtacattaacaaataatttgtctagataactgcaatgtttgactgtaactgtgcattcatggaaggcaggcatttgaaattactggcatccattttatggcaataaaatttcagagaaaatgcagaacaatcataaatgggagatgctaatgagaaacttttaatagatttaagcatttaaaaaaactagtgccaatttttacgttttaaatatacgctatttttaaacaaaatataactactgtaatccaagtttagaagcaaagaaaatccttacactgcttttatatatatatacacatatatatgtatatatatacacatatggtcagagcctcctatataaaatgaatatttggggaataaattatgttattatttagatataggctgataaatttgttgaaaattctataattcctttttgtctgcctgcacactaattatctaatttaattcaggcacaacatgtaaattctagtatagtaccctaaatttctgaatctaaaattacagacaaatttgaagtagaaaatagaaagtaaaaatgtatatggagagtgacattaataagatttttttaaaaaggtgccctacttgcttatcccctgaaagcaagaaaatttgtcagccattcctgataaaaacgcctttatgagagaaccaggcatcatggttcacacctgtaatgacaactacgtggcaaaataaagtaggagaattgcctgcagtcaaaatattaagacctttctgggttatgtaggaagacccccatttcaaaaataagtgcttttaaaagagctctgagatccaggaagggagctgtgaaactctgctgaagcccaagactgaaggtaattctgtttagaagacaggccctcattcaggtggcaaactacaggactactgtttttggctacagacaagaaaacgttccacctaacttggttccactgagaattttaaacttactctgtaacaatcccaaactcttcccagccatagtctgggggaggtcttgcccttccagaggcctggaggaagacctgcatttatagccatgcagtaggcctacagacctttgcctttactgtggtccctgaagcagttccatgatgcagttccagctccctgagccacagttcatggccggttctgcccatgtagaaacccaaagtgacctgggaaaattctctcttgtacttggtgaaagccatgctcatccacatcctgatataaagcccaccatatgcaggcctgactgcagaaacctgcccttgggtttgccctgcagagcacctaagtcctgaaggatattcactctgtccaaaaattaaatgagaattacaactatccaagccccttttaacaagaccacttaaatggattcttgtgcaaatccagaaggcttaaaaccaacctaaaacccctcttcactacaaacccagaggcattctatcactctggtggcctaataaaaatagatttttcctttctgaaaccagtttataaaatcctgaagaggtgtttgctccttcaaatttacacacaccaatgcaaaactattgtttcttattgtcaatgcttctattttaacattgcactgaaggcatgtgaaagaagaaatagtcaaaagaaaaatttaaagtcattgaagttgaagtgcagtaagtaaaacgtttgtttgtagatcatgtaatattaatatataaaaaataaaaagtacataaaaacctgtttaaactaatgaatacactcagttaattagcaaaatataaaattaacatacaattctgagtaatcattccatacacttaaaacaaactctctgacagaggaaaaaacaatcttatttatgatagcataaaataatccattttagaacaaatttaattaagcagctcataaatctttttttttttttgagacaagagtcttgctctgtcacccaagctggagtgcagtggcataatctcggctcactgcaacctccacctcccgggatcaagcaattctccttcgtcagcctcctgagtagctgggattacaggtgcccgccaccatgcccagctaatttttgtatttttagtagagacggggtttcaccatctcactggtcttgaactcctgatctcatgatccacccgcctcggcctcccaaagtgctggaattacaggagtgagccaccaagccaggccaagagctcataaatcttttaaatgaaagatatatcaataaaaaaattaggaaacaaataaatttaaaaatattttatttctattgaaagaataagaattgtgaaaatgccatattatccaaagtgatctctagattcaataaactccctatcaaaattccagatgtgatgcaaaaagagaacttaaaaatagtttaggccaggcatggtggcacacgcctgtgttcccagcactttgggaaggcaaggtgggcagatcgcctgaggtcaggagtttgaaaccagcctggccaacatgatgaaacttcatctttactaaaaatacaaagtattagccgggtgtggtggcgtgtgcctgtaaccccagctgctcaggaagctgaggcaggagaatcacttgaacctgtgaggcagaggttgcagtgagctgagattgcgccactgcactccaactttggcaacaaaagcaaaggtgcctctcaaataaaataaaataacataaaacaaaataaaatggtttaacagagtatctcaaaattatgcagatatgtatctgtccacaaaaacaagaagtcagattgtgcactcttttatatgccatgaacagtactttggctgtcactgtaaacttcaacgaagatcactgaagggaaagtagaattcttagagattttataagcataagcagaagatggccctatgtgagagtgtaatttttaaacaatttcaggcttcccagaaactatttccttaggaacacagcttcccaaatcgctttaaagacttactttcttcttgactttggacctctcatccatgtcgtctgttgtattcactctcacctacctggggtttcatccaccatctcatgtcgcttcatattccagggctcttttccttgctccagacaggtgatcaggtctggcttagagaaagcaatacctgttttattaaaaatagctaacatgaattttgttcatattctccaattaccgacttagtaatgtgctcagtaaaaaggatataatagattattctaataagtttatcccaatatactaatttataacagaaatttttaaatatttagaaaatattttaattttgtaggttcttaatttcagtgcctgccactgctgaataaaaaaattggtgaagcagatagattttaaggtgtgaataatattttatgccactaagcttctgaaattaccactaatctaaaatgaaggacacagatcagctcaggaatgtggaaagttcaggtcaagatgaaacatcttcaataaattttttctaaacagacaactccccaggattttcttgataacagaaatatgaaagcataagtaccagaaaacattctacaaagagaaatgaaatttttattttatattgaggaattttgtattaaagttatcctcacccaggaaggccaggtttatgtagttctctaacatcatcttcctatataaattcttctgtgcagtgtccaggtactgccactcctccagagagaattctatggccacatccctaaatgtcaacagtccctggaaaacacacacaaacacacatatttacaaagtggctatgaatagaattttttatttgacacaaggtaaaatcagaaagtgaatagaactggttctgacttaaaagaatgattgaaactatccaataaaataattgtcaacacacaaacgttttctaaggtattctctaactatgagataagagagtggcataatatccacaacctcagtgtatatgtgatacttgtctgaatgacaaaagtgtaaaattgagggcatatcacgaacatgtacatttttgagtgctatatttacataatagagaattagttgtgtatatttttcagaagaaaaagacatagtttatatatttcagacaaaatagacatgttgagttagacggtaccactcaaattttaatgtgtacaataaactggacatcttattaaggcagattattttttcaggagatctgaaataaagtctgaggtactaggctctaccaagctcaccagttatgccaatggtttggcaccaaaatactattttgtcaaacatccagtaagtggaagagcctgtgttttttttcagtttttctggcctgtaaacaaagatgagaatttcatttaccaaagaaagataaatgcaaagaaaacctttaaaaaaaaaaaaagcagctgccagattaaatgtgatggtttatgcacatcaactgcataaaaatacttaatgaagagaaaaataactctatagtgaaaaactctgtaagagagtttattaagtgagttattaacatcaactgcactaggaaaactttttatagtgtgctgatccacccagaaggacacagcatcactactgagatatggcccctactaaattactgtctgaatttaaccataagaaaacatcatttttatggaaagtacaagatacaggtatcttccatgttctacaatttttttttttttttttttttttgagacagagtctcgttctgtcgcccaggctggagtgcagtggcatgatctgggctcactgcgagctctgcctcccgggttcacgtcattctcctgcctcagcctcccgagtagctgggactacagacgccggccaccaagctaactttttgtatttttagtagagacggggtttcaccgtgttagccaggatggtctcgatctcctcgcctcgtgatccgcccacctcggcctcccaaagtgctgggattacaggcgtgagccactgtgcccggcctatgttctaacatttttaacagtcattttaagtagttctttctttagcaccctaataagcagttatctcctggtattttttcagaactttccaggtaataaatgccaacctatttaaatgagcattttcttaaccgtgtaatgcatagagtttgaacacagtataagaaattcttcttcaaatgtttagctagcttaagtttctttgcccttctgttccctgttttcaaggccagactttcttattctgtatgttccccctgccctggtaaacaaccttctcccagtttttatctatggagcccacattccaaatctattatcgactctgtgaatttcccctcccatcgcaatggctacttccgccgaaactgatcttcctgccttcccaaccgtataactgcattcctgcatttttcaagttagccaaatgggtttagtttagattatgcagtccaactccagccagcggaggcaggacacagtaacaagaaaaagctgcatcagaggtaataaaaaacccctactttcctttgttcatgtgcaccctcctgcagcgtaagctttaatttccatatcagagttattaacttggtttttgaaactaaaactaagtgttagaaacattcagcaaaattactcaaacacagtgttcatgtaacggaagaacattttaaggcgcttacactttatacctcaaagaatagcaaaagtatttattcctttcaggcaataaatgtattattttattatttgtattaaaactcatgtaggaaacaattagtcagccaggtgcggtggcttacgtctgtaatttcagcactttgggaggctgaggtgggtggatgacctgaagtcaggagttcgagaccagccgggccaatgtggtgaaatccccatctctactaaaaatacaaaaattagccgggcatggtggtggaagcctgtaattcaatctactcgggaagctgaggcaggagaatcgcttggaccagggaggcagaggctgcagtgagctgagattgcactattgcactccaccttgggcaacaagagcaaaactccgtttcaaaaaaaaaaaaaattagtcacttggaaacacttataggaggcaccaattttcattacataaaatttagcaataaactcaaaaatcaaaataacaggatacagggccaggcatggtggctcacgcctgtaatcccagcactttcggaagtcgaggtggatgtatcacttgaggccaggagttcaagaccggcctaacatggtgaaaacccatctctgctaaaaacacaaaacgtagccgggtgtggtggcacatgtttgtagtgccagctactcaggaggctgaggcaggagaatcgcttgaacctgggaagcgaaagtggcagtgagctgagattgcactccagcctgggcatcgttgtgagactctatcttaaaaaaaaacacacacacacacaaaaacaggatatagaacaaagatattcacggtcaaaaatttaccctgctaacaaaaggaactgaagttttcaggaatctatgtaactaaccagttaccaaccacattttgtgtgtgtgtgtgtggaaatgtattcattgtctatagctgaaattgaagagaaatttttctttgttttcttccttggtagctaccattctaaaagctagatggactgtatgaaatcactctgccataaaaacacacacctgagaaaatttctaaactcactctgagaaagaaaaaagtaagtgaaaattttcaacaaacaaaatgtattattagatattaatgtttttaagactcacctgccaggcgcggtggctcacgcctgtaatcccagcactttgggaggctgaggagggcgaatcatctgaggtcaggagttcgagaccagcctgaccaacatggagaaaccctgtctttactaaaaatataaaaaattagccgggcttggcagcatatgcctgtaatcccagctactcaggaggctgaagcaagagaatcacttgaacccaggaggtggaggttgcagtgagccaagatggcaccattgcactcctgcctgggcaacaagagtgaaactgtctcaattaaaaaaaaaaaaaagactcaccttttttatgtcctttgtaaatattttcttacctttcaagctctactactaaaatgcaatatacaattaaaaaaaaacagctgggcacagtggctaacacctgtaatctcagcactttggaaggcccaggcaggtaagtcacttgaggccagaagtttgagatcagcctggctaacatggtgaaactctgactctactaaatatacaaaacccagcagggagtggtggtcaacacctgtactcccagctacttgggaggctgaagcatcacccgaacttgggatttagaggtttcagtgagcagagatggcaccacttcactccagcctgggtgacagaggaaaactctgtcttaaaaaataaataaataaaccttaggtaaattaagtgaataaatcttttcaaggtacagatatgtcttattcatgtgtcacatcaggccattccgttacttgagagattgccccaccccaccctgcacacttaagtgctcaataaccctgtctcaggagactctgaactatgacccagagagtgcctcaggcacattttactctgcaagttcttacaccatctcaatggagtcagctttttggggtttggtggttttcttgtctttggagtgctgattttttttctagaatttttttactgtttttcttgtactatttttctgtcccctaaaggaatccaggacacagaaattatttttctcctcaatactggtatctgattggctgaccagcaatgagtctccaagaaatgaaagttgggttggatgaagacaatattaatgtctcaaggggttaactttgaaaaaaaaaaaaagtacaccaggaaatgcctcttagcctgagggcatccatgtgtgcacttgagaagctacactcaatacctcaggttgccctatgagcaaataagccccagggctgatattcactagagactctagcagacatagttatggtaggtattgtggtttttcccatacaatactgaaatccaggtccaagaaaaccggaagggtgactgaaaacacatcaccctataatgtttctaaaaaaaaaacttgacccaaaaacattctgataagatatctgtgtcaacggaaaatagaaggaaaaaaaacccacagagatattttacaatagtgtcagattattctttgcttaactctcataggaaatatgtacaaaaaaaatctttttaaatgtgccatcaaatgctttgtcaaaaaataattaattagccaggggcagtggctcaggtctgtaatcccagctctttgggaggcagaggcaggtggacttcttgaagccagaagttcaagaccagtctggccagtatagtgaaatcccgtctctaccaaaaatacaaaaattagccaggcatgctggcgagtgcctgtaattccagctacttgagagattgagacaagagaattgtgccgggcgcggtggctcatgcctgtaatcccagcactttgggaggcagaggtgggcggatcacgaggtcaggagatcgagaccatcctggctaacacagtgaaaccccgtctctactaaaaatacaaaaaattagctggggtcccagctactcgcgaggctgaggcaggagaatggcatgaacccgggaggcgaagcttgcagtgagccaagattgcgccactgcactccagcctgggcgacagagcgagactccgtgtcaaaaaaaaaaaaaaaacaaaacaaacaaacaaacaaaaaacagaatcgtttgagcccaggaagtggaggctgcagtgagcctagatgaagccactgcactccagcctgggcaacagagcaaggctctatctcaaaagttaaaaaaaaaaaaagattaattaaaataggtattaaaatgtatactaaatgacaaattgttgataaagtgaattagggaggggaaattggtatttgggaatgtcagacgaaactgaaaatttagtattttactgcaagccagagtcagactggaggaataggtgatgaggagtgaacttgaggccctgcttgtgacacgtgtgaaaaattcagaaaaaaaatcagtcccctgtggagtgtgaaaatcagtaagaggcaggaaattagattgaggtggctctagtccctggatttctacttcaaaaaaaaaaaaaaatctaaactgaagagcatttattggtaaataactacattggaggaaacaaaattcaggcttaaccaactataaactgccaattaagctgattacataaccagctttaccttgattataaaaattaagaaactatgctgggcgcagtggctcacgcctgtaatcccagcactttggaaggccgaggtgggtggatcatctgaggtcaggagttccagaccagcctgaccaacatggtgaaaccctgtctctacaaaaaataaaaaaaaaaaaaatggccaaatgtggtggcgagcgcctgtagtcccaactactagcgaggctgaggcagaagaaacgcttgaacctgggaggcggggattggggtgagccactgcactccagcctgagtaacagagagactttgtctcaaaaaatagaaaatcaaaacaaaacaacaaaaacaaaaaactacataaccgtaccaagccaattattgaatttggttttcttataaaaacctttccttcaagcgccttccatgaattgcaaattacaaactacagcagggtgctgctcaacaatttttgaatcaccctttgattaagttatttaatattttcgtggtgatgcccataaatttttaatagaaaaaaagggcctgggaatcccacggacaaaaagctcttcccattcgtgaacctgcaccccgaatcaggattctgccctgaccttcctcccatggtacttgcacaatctgggagagatgcggggctgcgggtccagagctgcccagagagggctccaggccaggacatggtcactgcgcagggaagagacaggccgtctggggggcccggctgtcagtgcagccgccatcttatggctgaaggggactgaggccgagctgggcaaggagaactctgggcgcagattgtggagatgactgcggagaggcctgagtcccatcaaccgcttcccaccggttccaaccaggctcgtcccttctctcgggatgtcggactcagcactttcaccatttctaggcttccagggggtcctcgtgtctcagctgtgaatgtccaatacctgcaggtcacagggccacagaggctgggcctctaaaagcagaagacacagaggaatgaggacaacaccaggaggaacgactgaagccagaggcaaaggccccaccaaataccggaagccgccctgttccctccagctgtgtgtctgattggacagttcccaggacagcgtccctgattggataacgtttaagacccccgccttctcaggccctgagtgatggaagatgtggtcagaggttggactgaaagaagaaagattgacagcctaagttgtagccttttcaggcaaggtttcttccctgagctgagccaggccaatcccagagcacgggaaaattctctctcttctttgctctctctttttttcaatgtattcaaaatgtaaactttttttttttgaaacggagtttcgctcttgtttctcaggctggagtgcaatggcacgatctcggctcactgcaactttcgcctgctgggattaagcgattctgctgcctcagcctccagagtagctgggactacaggtgcacaacaccacacccgctaatttttgtatttttagtagagacgggatttctccatgttagccaggctggtttcggccttctgatctcaggagatgcacccgcctcagcctcccaaagtgctgggattacaggcgtgattcaccacatccgccaactcgatattatctttaaagcaaaattaggaatgcctctgttctccagatattgggatatctagacagtcctaagtctggttctgcttagtaaacattaattcgttcccttaatcgtaaacatctagaggctaggaatgtctaacttgctgagaatgcagcccagcaagtctcagcatcattttcctagccctctctcaaaatggagtagctctggtataaatgcttctgacatattttcccccttgttttacaagaggatccttaatcctaagagttgcagagagacaaagattcaccttctgtaaatttttcaggctgagtaggggcgatgatattcctgactaactgttggggcctcttgcattcagagtagagagaaactcagtcagacagtgtttgtatagtgaaggtcgttcataacttcaagttccaaaaaaaggtgattactggaagactaataaatgtccaattcaagaaagcatttagtgagcttgtcttgcatttctacacaaagagtaaaaccacaatatatttcacaacagcaaagcaaaattagtaaaattatcccaggtaaactaaacaggaaggctctgcaagaagtgggcagttgttggaaccaagctgatacgtggttgactgatagtgcataaaaatggcagagatatgagtgcttaaaacttttatagcctgggtaatattatgtgaatagtctgaagcatacacacaacatttggttttgatcaaagcacaggtttccttttgggtctctgttaaaatgtctgcatgcccaacagtttgtttgattatgtagagaggatgaagtctgtgctcactcagtaaataagttactctctgcatgattccaacttatacccaaaagtagaatgccagtctatatctttatgttacctatccctttcatttcttctgaacaggagtcaaaggtcactggctcatgggaataaacaggatcagtctcttgtgttccgccagcctataggacttcataagagacaggtttaatttgagataagtggacccagctgtttattcccagaatttttaactgcagttggggtactaaagagaacttggtaaggtcccttccattttggggaaagttgacctgctggggatccttctttccaagtttttcataggaccaaatttcctggctgggttataaaaagattatcttccttagttgggaaagggagtctttgattttcatattcagagtgtgttttgtgcttgtcacataattctgtagcttgaaagtatctgtgtctattagaaggtatgtagctgagaaaggccttgcatgcattatttcaaaagagctgagctgcagatttcccttagcggccactggaatctgtaataaggctacagatagtaaagacagtgaggtctttgatgtttcttggcatagcatagcaagagtcctcttttgagtttgattagctatttttactttcaccaaagactgtggccttcatgctgagtgaaggcattactaaatttctagggctcaagatatgttctgtgtaattgtcactgtgaaagataggcctttatctctctgtaagctcttaggcagcccaaatctaggaattatttctttttcttttctttctttctttcttttgtttttgagatggattttctctcttgttgcccaggctagagtgcagtgacatgatcttagctcactgcaacctccgcctccctggttcaaacaattctcctgtttcagcctcctgagtagctgggattagagatgcccgccaccatgcctggctaattttttatatttttagtagagacagggatttcatcatgttggccaggctggtctccaactcctgacctcaggtgatccacccgccttggcctcccaaagtgcagggattacaggcataagccaccgtgccaggcgaaattatttcgtttagtaggaatttaggaacctcaattgccttttcagaccgggtaggaaaagccttgatccaaacagtaaatgtgtcaatgaatactaataaatatttaaaccttttacatgggggcatctaagtatagtctatttgccatctttaccacggtacattcctctatgctgaacaggccttactaaaggaggagataaacattggttggtcatttgcgttattccaggcacatagttcacaggctcgaattaccgggtttactgttttaagtaatcctttttctataaaaggccaacattaattgaaacagggaatctcttcccaaatgaacagagtcatacaaatgtttaactatttttcactgattagcacctcgcatcaacagtttatcaggagtgtctagcaaaatgcctgatatttcaataagcatccccctgtcatccactggtgtcctttagcttctaggactccttgtacttggtgtgggtttaaacctcagggtgttgttctaaagccagtttattggctttatctaccaaaagagaagttgctgcaactgccctgaggcatccaggcatgacaagaaagttatgtaagaaaaccaaagtctctaaaaaacagcttacagaatagataaaatggcatctatgggcttctcaatctatccctgtgaccatacagttttggggtgacagaaacccattataatgggtcaaaacagagtaagcagtacagaagaaagtttatatatatatatatattttttttttgagatagagtcttgctctgtttcttaggtggagtgcagtggcacaatctcagcttactgcaacctctacctctcgggttcaagcagtttctggctttttttttttttgcatttttattagagatgggaattcaccatgttggccaggctagtcttgaactcctgacctcaagttatccacccaccttggcctcccaatatactagaattataggtgtgagtcaccatgcctggtgaaagttaatattcttacctgccatggtgaaggttaccaaggcttctccagataatatggctagttgtctgattggagctttggtggaaggtctcgggccccatcacttttgggcacttgcctggctgtttaactcatcattagttagggtgccgatggctctcttcagaacactggattatccctcttccaatggccagttttcttacagtgtgcaccctgatttatgcccaaggcacagtgactcagatggccagctttggtcttcccacctttcagtttctattgttcaggccaagactcaggaggcagccccatgtgggaggttagcttaaggttgcaaccaagagctgcaccttgtgggaggtccttcttgctctttttgcttcctctactttttccctgttattaaaaactaaaaatgccatatccaaagctgttccatagaagtttggggacccacagctgcttttactagttttctatggtatcaggggcagactgggttataaaatggactcccagaagtgtttatcttttccttgaggcaggatcactgttagtatatctcctggttgcctcaactaaacactattgaaacagagctggattctcatctttgccctgagaaacttcgttaaccttttcacttttaacaggctatttcatgcctttcttcatctcttccaaaaaacaagtgaccatatgatctcttctcccaagtcctcactgcccctgtgatagttccactctagaacttgatctggaactgctatacctcctgtctgatatatattatggttctggttgtgagccaatatctcatctgcatgggtcctagctgtcctgaaaatgcattgtttcttttccactgtataacacagagacaacaaaacatacagatcctgccaagttaaactagagatcaaagttaacttctcaaactcatctgtgaattttcctggatattcagagaaataaccaaacttgtcttatatagagccaaaccagacatagaaaaggggccatgtcttctcacaggcctttttctccatttgcaacctctctaagtggacaaacatttccctttggaggttgataggcagctccactatgagtagtactcactgagctcagttattcaaggagtggtgggtatagaatgggactagatgggtaaggaagagggatgaagggtcctcaatagaactttcaggtggactaggggtagaaaggatggacacagctgaacctttagagctgacagaaagaggttctgtttcaccccaaaatgcccactgaaccaagtggccgggggtgggggggggcttgcaataaaggatcagcttgtctgtctaaatttttttcttctacttctctcaggaaacatgtccatgcctgctgcagggtttcattctgactgagcagcaaaaatgcttgaacatgaagtattttatcctattttccctaccacttacagaacaaatcgagttgaactacagtataagtacccattagaggcaatttttcttgtatctttctgaaattgtttgctgcttttccatgcagatcatccttaagaaagtgtacaatcttagcccaatctgcaatctctgttcctgaggttttagtaacatgatgtttctcttttgttgtagacagcactgaagatgagttttcatcccagggaacagaaagacaaaaggtcaagatgtgcttcaaaaagctggtgaggggcattgggtcaggaaaggccaggctgtctaagcattcagagaccccctgtgcaactgtccttgcaattaggagccaggccccaaaaaccttcccactgcgtgtgtctttgacctgtgctaggtcctgctgttgattagtgttccctactgagcagttaacctatggtttgagtatttacacccaggagaatgttgcaggccagccctcagtcaacttaaaataatcaaaaaggttaaaatgtaatctgaaatacatttactcaaggtcagatattgaggatgaccaccaggaaaacaaatttaagttgccctggatatatatttcaattagcagccattcaaagcaagtcttttcaaaaaaatgagaaggcagttcctaagttgttaaccaagaattcatatttaaatgcataagctattgattggctatatatattcttttgttttacaaattccagaaataatggatgagactgctagtcagaaacaaaatgtctataaacaattgcccctaatcccagcattctgggaggcctaagtgggcggatcacctgaggccagcaattggagaccagcctggtcaaaatggtaaaaccccatctctactaaatatacaaaaattagctgggtgtggtttcatgtgcctgtaatcccagctacttgtgaggctgagacagaagaatcatttgaactcaggaggcagaggttgtaatgaaccaagatcatgccactgcagtccagcctgggtgacaaagtgagacttcatctcaaacaaacacacaaaaaaagaatttcccctgtgtaaagttccacactttcatctccctggtcttgataaattgtgcagaccttacagagctgagactgctctgagctatttttattttcacctccttgctccggacacatgaactattaacaataaaaagaatttacataagaatcttggcaagccacaagaataatgccaggaggtgacctccaggaacctggctgtcaccttcttttcccaccttaccctccactcctcttacacacacacaccctggatcacaagaccaacaaaaccactccatcagccacagacagagaagccacagaagaacccagaaccactgcatggcccccttggaccaccctagaatgaacagccattgttaacattcaggagccgtttattcccatcttcacactacactaaataactttcaagagtcacaagataaactggctgaaagctgatgcttggaacatcccacatcccccaggagctcagtgctgcagtctcaggtacaaacctgcccatcagccattcaaatgaaacaattgttatcaagagagcagagtccctgcaatggtccattaatttagaaagtttattttgccacagttaagtaggagcctgtgacacagcctcaggaggtcctgatgaaatgttcccagggtggttggggtacagtttcttatacattttagaaagtcatgagacatcaatcaatatgtttaagatgtacattggtttagtcaggtatgatgggaaaacttgaggttggggcttctgcatcacaagtagataagagaaaaaagaataaatgtatttgagcccttgataagtctcccactgagtacacaatttagtctggctcagtgaatctgcattttgatattaacaatagagcagagaaagtaagcagatatgtatttgtctcaggtgagcctcagagggatgactttgagttctgtctgtcgtctactcagtagaaatattcttgtcagcaaattgtgaggtaggtgtatagcttttttatctgcatagctatcttatttaagaataaaatagaagacagctttgcttgacatagtttccagcttgacttttctattggattagtaattttgacatcctgagatttatttttctttcacagcggggaacttttgattatcaagtgtatctgtttaaacttgacaataaaacaatgtatctattcagaagtaacaaatagaggttaatggaaaacttataaaacaaatataactatttgtctttataatctttcacaatagcccatcttaggtcttccatttcttattcactataatttaaataaaattttttcataatgttatagttgatctctttgtctgcggcattaaaacgagggtgattccatcttgaatagtgtcaggtaaaatgaggctgagacctattgggctgcatcctcaggttaggcattcttagtcacaggatgagataggaggtcagcacaacttacactgtatttagcaatatgtcacaatcatccctgtaagcagggtgcaggcacaatacaggagtcagatatttaggtcatggatgcagagatatgtcacagagtccccaggggcagggtcaagaaaggagctttctattccctaggagttgagcccaccaatatatcacaatacccaaaatatgtgagacccaccccccccaaaaaataaagagaatcacatcaccaaggtgctgggtcaggtgatatgttgcaattgccatttgtggcagactccagccataagaacagagtcacaacacctaagtgataaaacgatatttcataatacccttctgaaaacagtccatgcagaagactcatattacgtaggtgctggtttcagccatacatcacaatgcacaatgtatgcagagaccaggcaaaaaaatgagtcacatcttgggcagagccaaagcagtaaatgagagtcacatcacctaggttctgggtacagaaatgtcacagtaccctctgaggaaagagccctggcagaaaagtcacatcatctaggtgagagacccagagatatgtcacaatgcaccctgtgagtagggctcagaaagaagagaaagatcacataacctaagagctggacccagctacatatcacaaccaccttagtgggcagggccaaagcatgagaagagccacatcatgtaagtacttgaccaagtgatatgtcacaaccttcactgtggacaggccccaggaaagagagtagagtcacatcatctaggtgatgggcccagagatatgttacaataacttctgtggacagggaccagacagaagaatgacatagcctgtgtgctgatctcagggataagtcactctcttttatgggagcatggccgtgagaggaaaggagaatcacatcttctaagtgctgcccccagagataagtcacaatctctcctataggccaaacccaagtaaaagagtcatagcactaagatggtaggttcacagatatgtcactatgcctgctgtgagcagagtttcaacagacggctcacattaccttgttcagtccagcagtatgtcatgatctacattgtgagcagaacctatttagaagagaagactcacttcagctaggtgctgggaccagtaatagaaaaaaaatcatttatgtgtgaagggacctggtagaaaaagagagtcacattacttcagtgattggtacagaggtgggtcataatgcttcctgtaggcaggacccaggaaggagagttacatcacctggatgttggacatagcaatatgtcacaataatccataattgcagggcacaatcaggagagtcacataaccaaggtgtgggtctcagtcacatgtcacaaagccctctgtgggcagtgtcaaggcatatgtacagtcataccacctaggtgttgggtccagcgatatgtcacaatccaatctataggctgggcactaggcaagagaatcaaattactcaggtgctggtcagaggtgtatttcacaattacagttgcagtaaatgtagggaaaaattaacaatcctgcacatgacccatttctaggtattagaatcaacaccctttgtaagttgagtttgagtacatcagttacaatctcaatggtggactgaatacatgtataagagtctcaatctttgctgtgaactgtgtccccagtgaagtcaaaacctcactggtatgttgaatcttggtctgagactcatcaacccacatatagactgaatccatgtgtgagagtcaatttttcaacttttggctacctccaggtgtgagaatcacaacttcaacagtgagctgtgttcatgtggaaagatgtcaatctttactgtttgctgggtgtgcgtataagtgtcacaatgtcacctgtgatggacctcattataaaactctctgtaccacctgaggtatttatacaatatgcatgatagtcacaattttctctgagactttttcctagtatggactcataattgtacctgtggaactaagcccatgtatgcgactcaacagctctccaagtagctgggtccagagagagagtgttcacctgcctatgacctgggtttagaaatgagtcaccatgtgaactgtgatggcatgatcacacatgacagtcagaatttttactatggactgcattcacctgtgaaattcaggatctctccagtgggcatcacattctctgtaccatcaaaacactttatacaaaatgtgaaagaatagtaatcctctatgatgttattatctagagaagacccaggaatatacccatttctccaagtttagttacaagtgccagtatctctccttttggctgattcatggtattagtgtcaacatcacaactgtgagcttggctaaggtatatgtcgcaacccaaactgtagaaagaaaacaggagagtagcatcacctgggtgctgggacagaaatatgttacaatttttttagggcaggggccaagcagagagtcatatcacttggttgcctggccagggttatgttacaattctcttccaaaagcaaggcacagaaagcaaagtcacattaattgggtaatggactcagctatatgtcacaattttctctgcagttaagacatgtgtacaagaaaatcaccacctggttgctgaactcagaggcatgccacaatcttctgtgtgggcatggtgcagatggaagaggagagtcacacctccaaagtaatggatgaagagctatgtcacaaggcctcttgtaggcagagcccaagcaagagcctttcacccacttggtttgacccagcaatatgtcttaatacctaaaatacacagggccgatttgaaagatgagagtgataaggcctggcaaaatggctgacacccataagttcaataccttgggaggctgaggtgggcagatttcttgaggtcagcagttcgagaccagcctggccaacatggtgaaaccctgccgttactaaaaatacaaaaattagccagttgtgggtgtgcacacctgtaatcccagctactcaggaggctgaggcaggagaatcacttgaacctgggaggtggagtttgcagtgagccaagatgatgctactgcactgcagcctgggtgacagtgtgagactccatctcaaaaaaaaaaaaaaaaagaaagaaagaaagagggatatcactcgatgctggggccagtgattttacaatcccccctttatacagggctcaagtagaaaaggacagttaaatcacctaggtgataaacaaaatatgtcataatttccttatcagaagggctcatgggggagagtcacatcacctagctgttggacacagccatacttcaatatacacaattttaaatatacataatatacaatttgtatattgaaatatggttgggtccaacacctagctgatgtgactctcctgcataagccctaccaacaggggacatatgacatattattttatttatcacctaagtgatgtaactcttctttctcacctgaaccctgtagaaggagaggagagtcacatcaccaaggtgctgggcccagtgatatatcacaatccctccttgggcagagcccaagcactagaaaagagtaacatcagcttattgctaggtcagtaaaatatgggacaaaactccctaaaaaacaaaaggcccatgcagcagtctacctaatttagagcttcagagatatgtcaaaatgccctatgtgggtgaagttcaggtcaaagagaaatgttatataacctagggccttcacctagttatatgtcacagtcaccccagtgggcaatgctcaggcatggggaaaatgttaagtaggtgctgagacaagtgatctgtcataatccccactgttgacaggtctcagagacaaaaaaaaaaaaaaaaaagtcatatcatctagtttagtgggccagggacattcactatgtcctctgtagacaggtatgagacagaaaaattacatcacctgtatactgtgcctagggactagtcactctcccttctgtggtcagggcccaggtaggagcaaagggtaacatcatgtaggtgcttggcccagatatgttacaacgtcccctatggaaaagcccatgtaaaagtggagagtaacatcaaatagatgatgggtccaggaatgtggcaaaatgtctcctgtagccagggtctaggtaggagattcacatcacatgggtgttagacccagcaatatgttacaacagcccatgtgggcagggcacataaatgacaaacacattacctgggtgcagagaccagtgatatgtcacaatgccctctttggcagcaccaaggcatgagtacagggtcacatcatccacatacttgttccaacaatatgtcccaatcccatctgtgcactggccccaggcaggagagtcaaatcactcaggctatgtgcagagacatgtttgacaatcacacatgcagaaaggctcagggataacatgaataatttttcacatattcccatcctaggtatgagagtcaataccaggccgggcatggtggctcatgcctgtaatcccagcactttgggaggctgaggtgggtggatcacaaggtcaggagttcgagaccatcctggccaacatggtgaaaccctgtctctactaaaaatacaaaaattagctgggcatggttccgtgcactgtagtcccagctactcgggaggctggggcaggagaatcgcttgaacccaggaggtggagcttgcagtgagcctagatcgtgccactgcactccagcctggtgacagagtgagactctgctccaaaaaaaaaaaaaaaaaaaaaaaaaaaaaagagagagtcaagaccatttggaggttgggtctaagtacacaaatcacaatctcaatgtggatggattcctgaataagagcctcaatctctccttcagactgggtcttctcagtaaaatcatagcctcagagttgtgctgaatcttggtctgaattaccagcccagatgtggaccagatccacatacgagagtcaatgttgcaactttccactccctccagggttgagattcagaacttcagaagtaggttgtgtttatctaaaaggatggcgtagttactgctgactggttttgagtaccagtatcacaatgtcaccagtgtgcttggtcatgtaagggcattcaatgtattactgagggctttattgccaggtgtgtcccacagattctggtctatggattaaattagtactcagacacaggtatgcagtgtaagagcagctaagggaatgccaggctttagtagccaaagtgcagccctaagaagctggagccacttgcttttttcagtgcaggcacaataccaaaaacctggagccaacacaagctgcaggtaattaacatttattgttcccctttcagggaatgtcacacacgcaaatgatcaaaggtcagttcctgatcaacataagtaaataagcctgtttaagataaattcttccacactcccttgtacctactgcttgctctctgcctcagggttatagaacagctgccttcagctattctcccctggagctctgcaggaccttccaacatttcagaaaatttgcgttctttccctatcctttttccaccactctgaccaatctcccacatctcccctttttctgtttttttgcatcaggttttgttgattgaagcatacagatctgagcagcgacaggtttgactggtgcaatggttacagtttgtgttccagctttgcaccctagaaccagtaaataacataagacaaacatgagtataatcaatattattcttttccaatcaaggattgatatgtaatgttacttggcacctgagtccaatgtgtgccattactgagggaccccaccgggggtaagtcaatacctcccagccaattggtcacgttgtcagaggctgagaagggggtaccttcccaagtaaaatgccgtaagaaaggcagatctagaagatgggcccaatagtttatagcaggtgtgggttgcaggcaaaaagagagaataagaagaatcagtattctataagagttgcaatgtggaataaaaagcatagcaaagaacaaattatatggattgaatggtatctgtgtctgaagcagatttgttcagcctcctgagttgtgttcttcagcattccccaggtaatgtctggggcctgtgtcatccaaggaagccacatcatccagggttgtgggttctgcatcgtcatttcctttatttctggtagcaggttgggccctagtcatgccgtggtaaggtttgatgcatcatgctggaatccaaagaggacctaaggggctgtgaacacaagcatatcccctttcccacgttagcaaatcatttggaccacaccgtacattactatttacacctttccataaaactgaaggctttctattttgagaggtttttgcaaagtgcttatctatggctcattgaaatgtatcatctaaatttaagaaattaagagtaaataaggcttgtgctagtagtgttgtaaggtccctactcatattcacccttttttgattttaagcgtattcttaagggtggaatgggcacgtttcactatgacctaagttaaatgattgataaattcaacaaatggctcctggggcccttgtcatacatttagaaaagatcactgttgaactccacctttgagaatttggtcccaggccctgtgagtgcactgactctgtgcataggctgggggaaaaatttaattgttgttgtacatttacatagggacccctcccctggagtatagcagctgttatgttttgcctggccaattgattctggttagcttgttgttctcataactcatcatgttatgccctccagaggaggtattgactggcctctgaagttgttttagctagcactaaccagtcccatggggtcatgtggaagttatatgctatggcctcaattaatcctttcataaatgggctagtggctccattttctctaatgctctttcttatttctttataagtcttgaaagcaatgggttcatgtacatgattgccttgttgatcttccatcatcaggcaagccaagagctccccctctaatgctgcttgcctaagacagggtcccataactgtagtgtatcccttgtctttttctcaatttactgggggaggggctcagggaaaatctatgtctcctctgtggcaccttcactcggtaatggcggggctgagagaggaggagatagtaaggtaggtgatgattcttcctcccttcccattttatgctcttctgtgtagagtggggccaaagcagtcctaacttaaggcccataacattaaagaacattaaagatgctactgggactcattgtccttgtgcataatgtcatttaagatttcttcccacttgttcccagagctctaggtctagtgtgccttcttctaggaattattggttacagaaaataacagtttgcattagggcccttaattgagcctttgaaaccgaggcttcactagctttaagcagttgtttcaatacttttatatactgttgctgttgagctgattactgttgtctcatgatgaaaccctaggttgaaaaatcccccaaacttggaaatccccagcgggcatcaattacttactgtgcagtaacttcactttcgtttttgagggttccatcatgatgcatttcattgcttcttacatggggcaccacctgctgggtctgtcccacagatcctggcagacagttgaaatgagtactcagacacaggtatgcagtgtaagagcagctaggggattgcccagctctagtggccagagtgcaatccaaaaaactggagctgcttgcttttattccatgcaagcacaatgctgacaacctggaaccaacacaacctgcaggtaattaacatatattgttcccctttcagagaacgtcatgcagatgatcaaaggtcagttcctggtgaacacaagtaaatatgtaaagaagtctctttaagataaattccctcacactcccttgtatctaccccttctcctctgtctcaggattataaaacagctgccttcagctattctcccctggtgctctgcagtaccttctgacctttcagaaggtttgcatctttccctataatttttccaccactctgactgatcccccacactttatacaatatgcttgtgagtagcaatccactctaaggcatttgtgatggtatggacccatgatagtacatgtggctctaagcccaggaatgagtcaacatctctccaattggctgatccatataggaggtgcctcacctgcctatcacctacatttagaagtgagtcatcatttgtagctttagaaatgagccatttctggctgtatgtttgcacatcactgtcacaattccaactgtggactgcatctgcatatgagatttaggacctcaccagtgggctctgtctatgtagagattacaattgtaatgtgtggcaggatgttcttttaagaaacacaatcttgggctgggcatggtggctcacacctgtaatcccagcactttggggggctgaggcaggtggatcacctaaggggtggagtttgagaccagtgtggccaacatggtgagtgaaacccctaaaaaaattagctgggcttggtggcacgtgcctgtagtgccagctacttgggaggctgaggcaggagaatcacttgaactcaggaggcagaggttgcaatgagccaagattgtgccactgcactctaacctgggtgacagagtgagactctatctccaaaaaataaataaataataaataaaagaaacacaatatcatccgtgtttttgtcacttgatgacactctttgtgccacccaagggctttgtacaatatttgagagagtggcaattctctatgaactcagtgaaaagaaaagacaggatcgtgttcattttcctaacactagctaggagggagtgtaactttttttggggggtgggggaaggagtctcactctgtcacccaggctggaatgcagtggcgtgatatcggctcactgcaacctctgctgcccgggttcaagatattctcctgcctcagccttccaagtaactggtattacaggcacctgccaccatgcctggctaatttttgtatttttagtagagacgaggtttcaccatcttggtcagtctggtctcgaacttctacctcatgatccacccacctcagcctcccaaagtgctgggattacaggtgtgaaccactgcatccagctgagtgtaactcttttattgccttgttcaaggtgtgagaatcatcatagcaattgcgagctggggcaagatatatgtcacaattacactagtgagtagggagtgagcagaagggtcacatcacctgggggtggtctaaaggtatgtcacgatctcttctgagggcaagaaccagacaggagagtcataacacatcacctaggtgcttagccagggatgcattaaaatcaattcctataaggcagacttgggtgctctggctcatgctggcaatctcagcactttgggagaccaaggcaagtggatcacctgccagccaaggcaacatgttggaaccccacctccactaaaaatacaaaaattagcctgttgtggtgatgcatgcctttaatcccagctacttgggaggctaaggcaggagaaccacttgaatccaggaggcagaggttgaaatgagccgagatcacatcactgcactccaacctggatgacagtgtgagattctgtcaaaaaaagaaaggaagaaagaaagaaagagagaaaagatgggcataggccacaagtcacatcacctgggtgctgagcccagtgatatgttacaacgctgtctttgagcaacaccctgagaggtgagacacacacctggtggctgatcccactgacatgctacaatcttttcttcgtgcatcgtacatgtaggtgaggagagtcacatttcataggtggtggatgccaaaatatgtcacacggtacctgtgggcaggacccaggcaggagcctctcatcccctaatgtcagactctgtgatatataacaatatgcaaaatatgcaaggtccagtcaaaagatgagttacatcatctaggtgctgggcccaatgatacgttacatttcctactgtggacaggtccagaaagataaggagacacctatcacttaggccatccagagatatgtcacaatgaccacttgggcaggaaccaagaagaatcaaatcccctgtgtgctgggcccagcaataagtcactctcacttctgttagcatgacccaggcccaaagatatattataatctaaccatggacaaagtgaagataagagaggagagtcacataaaatagttgatggacagaaaactcgcatcatcaggggtagggcccagcaatatgtcacaatgtcttatgtgtgcaggtccaagaaaaaaaaaagtaatatccctttggtgcttagttcagtaatattgtaaatattgtacaatttttcccacaggaaaaactaaaaaataacagaaaaaaatcagctacatgctttgaaaggtcacaattctccctatgagcagagacctggtaacacaagagagtcatatcacctgtgggactggtgccagagatatcttttttttttttttttgagatggagtctcactctgtcacccaggctggagtgcagtggcacgatcttggctcactgtaacctctgtctcctgaattcaagtgattcttctggctcagcctccctagtagctgggactacaggtgcccatcaccatgcccggctgttttttgtatttttttttttttttttttttagtaaagacagggtttcaccatgttgactaggctgggctcaaactcctgaccttgtgatccatcagcctcggcctcccaaagttctgggattacaggcatgagccaccgtacccagccacaaaaaacattttaaaatgcctcctgtagccaaggcccaggcataaaatttacatcacctgagtgttaaactcagcaatatgtcacaatggcccaagtgggcaaattgcaggcagttgagtcacaaattgtcagtgcagggcccagcaatatgtcacaatgtcccctgacaccaaaacctaaaagaagagaagagtcacataagctagttgctgggtgtagcaatatgctacaatttccctgtaagcagggaccagcagaagagagtcacattacctggatgctgggccctgtgatatgtcaaccatctttcctgtaataaagacccaggaagcagaaacacatcatctggttgctggccacagcaatatgccacaactttccgtgtaggaagggtgcaggtaggagagtcacatctcctaggtgaggaatgcagagacatgtcacaatgcccctgtaggaagagcacaggtaggagactcccatcccttaggtgttaagtttagcaatatgtcacaatacccaaatatgcagagcctgaaaaaaagaggagaatcacatcacctagatgctaggccagtgatgtgtcacaatttctctgagcagagaccaggcaggagaaaagagtaacatcaccatggtgatgggcactgagttatgtcacaaggtcccctgtaggcagacccagaaaaaaaagttacatcacctaggtgttaaacccagaaaaatgtaacaatgtctaatgtgatatattgagccccaatatgacacaacatgtaagacacatttgagagagtcacataacttgggtgcaatgttggtagcaagccgtaagcctatcataaataggtcttaaagatactggccataaacaggatttctgcagcaatgtgacatgcttgtgatggctgtcatgcacactgctaaaagttgttggtttactggagcagggcaagggacacctggcccagcctggatggaaaaactgctcaaactgcaaatgatagcaggagcagcctgtgccttgagagcatgtttttgctgcagataatcagccagagcctgtttctctgctcctttctgagaatcctttgtttcccataaggaatgcttttagctaatctataatctataatctatagaagcaatgcttatcactggctttctatcaataaatgtgtgggtcaaactctgttcaaggctctcagctcagaaggctgtgagacccctgatttcccactccacaccctatattctgtgtatgtgtctttaattcctctagcactgctgggttagggtctccacgatcgagctggtcatggcaagcagtgcccaacgtggaggctcaaacccaggtcagtgtgtcaccagagcgacagttggagaacatagaactaagttggaggacacctgagtactctttttttttttttttagggttttcaaaataaaatttttctttttttttttttttacaggtgaattacatttatttatttgccatattgttcctgtttttatcatggtgaattagaagcacaattgtgaaatgatggtttaaggctttttccctcctggacttttcttttttttttttttttaattgatcattcttgggtgtttctcacagagggggatttggcagggtcataggacaatagtggagggaaggtcagcagataaacaagtgaacaaaggtctctggttttcctaggcagaggaccctgctgccttccgcagtgtttgtgtccctgggtacttgagattagggagtggtgatgactcttaacgagcatgctgccttcaagcatctgtttaacaaagcacatcctgcaccgcccttaatccatttaaccctgagtggacacaacacatgtttcagagagcacagggttgggggcaaggtcatagatcaacagcatcccaaggcagaagaatctctcctagcacagaacaaaatggagtctcccatgtccacttctttctacagagacaaagcaacaatctgatttctctatcttttccccacatttcccccttttctattccacaaaaccgccatcgtcatcatggcccgttctcaatgagctgttgggtacacctcccagatagggtggcggctgggcagaggggctcctcacttcccagaaggggcggccgggcggaggcgccccccacctccctcccgatggggcggctggccgggcgggggctgccccccacctccctcccggatggggcagctggccgggcgggggctgcccccccacctccctcccggacggggcggctgccgggcggagacgcttcctacttcccagatggggtggctgccaggcggagaggctcctcacttctcagaaggggcggctgccgggcagaggggctcctcacttctcagatggggcggctgccgggcgaaggagctcctcacttctcagacggggcggccgggcagagatgctcctcacctcccagacggggcggcggggcagaagcactccccacatctcatgatgggcggccgggcagagatgctcctcacttcctagacgggatggcggctgggaggaggcgctcctcacttcccagactgggcagccgggcagaggggctcctcacatcccagatgatgggtggccaggcagagacactcctcacttcccagacggggtggcagccgggcagaggctgcaatctcggcactttgggaggccaaggcaggcggctgggaggtggaggttgtagctagccgagatcactccactgcactccagcctgggcaacactgagcactgagtgaacgggactccatctgcaatcccagcacctcaggaggccgaggctggcagatcactctcggttaggagctggagaccagcccggccaacacagcgaaaccccgtcttcacgaaaaaaatacaaaaaccagtcaggcatggctgcgcgcacctgcaatcgcaggcactcggcaggctgaggcaggagaatcaggcagggaggttgcagtgagcagagatggcagcagtacagtccagcttcggctcggcatcagagggagaccttggaaagagagggagagggagaccgtggggagagggagagggagaccatggggagaggaagagggagagggagccacctgagtactcttaatcaatccccatggtgagtaagaaagggagctcagaagcatcagggtaacaatggacaagtgtgggctctggttcgttccaccttggaacattttcacaataatgatgaggaggaaggaaagtataacaaagtaacagaagaggtaacagagcaggtttgtttgccagctaaagctaaagcctcaaaggaggaagaggttcatccctagccttctgcaccccattattttgaagaaaaagagtggcctgaccctccagatctttcttttcccgaggacactgggcaaaaagtagttgccccagtgactgagcagcaccttgagtgaccgctctcagttctattcaggcaggaatccagcaagctagagagggtgatatggatgcttggcagttctctgttagaatatacccacctgatcaatagggaaatattatggctatgtgtgagccttttccttttaaaatacttaaagaatttaaacaaggtattaatcaatatggaccaggttctacttttgtaatgggactgttaaagagtgttgctgtctccagtcagatgttgccagcagggatggtaggattatttctaggtaggtctagtttaaatttaaaaggagtacaagtacatacaggaatcattgattcagattacaatggggaaattcaaaatgttatatctacttctgttccctggaaagcagagccaggagagtgtatagcacagcttctgattgtgtcatatgtggaaatgggggaaaatgaaactaaacagacaggaggatttggcagaaaaaataaacaagagaaagccacctactgggtaaatcaaattactgataagcatcctacctgtgaaataactattcagggaaagaaatttagaggtttggtagatacaggagtggacatttcaatcatttctctacagcactgaccatccgcacggccaactcaaccctctcaatttaacatagctggagttggtaaagcccctgaagcatatcaaagtaattatattttacattgtgaagaacctgatggacaatctgggactattcagccaattataactctctacctataaatttatgggggagagatttattacagcaatgaggagcagaagttctaattccagaacaattatatagccctcaaagttagcatatgatgcaagaaatggggtatgtacctggcatgggattaagaaaaatttacaagtgttaaagaaactgcttcaagtgggaggacaaaattctcatcagggtttaggatatcatttttgatggtggccattgttaagcctccagaacctataatttcaaaatggttaacaaataagtcaatttggatagaaaaatggccactgagtaaagagaaactggaggctttagagaatttagttaccgaacaattagaaaaaggatgcatagctccaacattttccacctggaattctccagtctttgttattaagaaaaaaatcaggtaaatggagaattaattcagttacacaacctataggaacattacagccaggattgccttctccagctatgattccaaaaaattgtcctttaatagtcatagatttaaaagactgtttctttactctccccttagctgagcaagactgtgaacggtttgcatttacaattcctgtggtaaaccatctgcagcctgctaagcgttttcattggaaagtcttaccacaaggcatgttaaacagtccaacaatttgtcagacttatgtaggacaagcaattgaacctacttgtaaaaaattttcacagtgttacgttattcattatacagacgatatgctttgtgctgccccactcaggaaatattattccaatattatcacttacaaaactcggtttcttgagctggtttaattatagctcctgacaaaattcagactactactccttactcctacttagggaccttagtaaatgacactacagcagtgccacagaaagtaaccatacataaggatcaattaaaaacattgaatgactttcaaaaattactagcagacattaattggatatgacctgctctaggcattcctacctatgccatgagtaatctattttctatccttagaggagatcctaatctcactagccctcggcaattaataaatgagactgagacagagttacagctgactaaaaagcaagtgcataaaactcaaataaatagaatagatccagaaaagactttagacttattgattcttccaactcagcattcacctactggtgttattgttcaagagcaagatcttgtagaatggctttttcttccacatactaattcacagactctatctccttatttggatcaaactgctactctgataggaaatgggaggactcaaatcattaaattgcatggatatgatcctggaaaaattatcgtccctcttacagaggcacaaatacaacaagtctttataaatagtcttaattggcaaaccatttagctgatttcataggtgttcttgatagtcactttccaaagacaaaattattttaatttttaaaattaatgaattagattctccctaaaataactaaatttaaaccaattgaaggtgctggaaatgtttttacagataagtctactaatggtaaagcttcttattctggatcaaaaagtaaagttttctagacaccctatacttcagctcaaaaagtggagcttgtagctgtaattgaggtgctgactgcttttgagatgcctgtcaatgtaatttctgattcttcatatgtggttcattccacacaattaattgaaaatgctcagttatgatttcatacagatgaacaactaatgactgtatttacccaattgcaaacagcagttaggaatagaatgcatcctttttacattactcatattagagctcatacacctcttccaggacctttgactgcagggaatcagatggctaattgcctagttgctactgcaatatctaatgctagacactttcacaatttaacccatgttaatgactctggtctcaaacacaggtacagtattacttggaaagaggataaagccattattcaacaatgtccaacttgccaaatggtgcattctacatcttttacaggagttaatctttgaagattggtacctaattctcttcggcaaatggatgtcactcatgttccttcttttggtaaattggcttatgtacatgtatgtgtagatacattttctcactttatttgggctacatgccaaataagggaatcttctgcctatgttaaatggcatctcctgcaatgcttcacagtcatgggcattccagcttcagttaaaatgcacaatgccccaagctagagcaaagctcaagctacatttttctctatatggaatattaaacacattactggtatctcatataattctcaaggacaagccatagtgaaaagaacgaatctctcattgaaacagctgttgcaaaagcaaaaagggggataaacagggactatgggacacctcatatatacaattgaatctaacattattaaccttaaattttttgagcctgcccaaaggccagatgttatcagcagatgaacagcatctacagaaaccagttgcaatgacagaagcagaacaactggtttggtggagagatctgataacaaaaagttggaaaataggtaaaataataacttggggtagagggtatgcttatgtttctccagcaaccgatttggataccatcaaaacacctgaaaccttaccatgagccagatgctgaggaagagattctgggaggatcccaaggaccccctggttgcagtcatgtcaagactgatgctgaggaggaccccaactatcatgagcaacacccatcaaatacagccacctacctggggacagatcaagaagctgtcacagatggtggaagaaaacctgaggaaagcaggcacggtgagtaatttaatgatagctatgatagcagtgatcaccattgccatgagtattccttcagcaagggctaacacagagaacagttatacttattgggcatatttatcaatcttggctggcaataatgcctggatgtaatcactctatgatgcatttacacgtgctttctggtctcagcatttaccataataaatctgctcctataactgaggcataccaccctcaaaaacctatttgtaaacagaattaaacctgaccagaagaaatgaacatacttgtttgggaagattgcattgcagaacaggcagaggtgatgcgcaacgattcctatggaatcattattgattagtcctctaaggggacgtttagcttgaattgcacctctcagtctgtgtgccatggccacactatgttcagctggtctgaacaaaatggtcagatggtagaaatggtaagaagtgcggcaagagttcctattatctggaaacatggcagtatagtggcacctcaacctcaaatgatatggctcactctgggagctaaacataaggatttgtggaaactattaacagctcttaataagatcaagatttgggaaggaaaatatactatgccatcagaatataatcctaattacattttagaactttttgaaaacaatacaatgtgaatacaaagttgtgttcaccctccttttctgttggtaatgggtgatctaaagtttgacatctctaattatcatgtaacttaccaggaatgtagattgttctcttgtgtgaactcttccttgtttagtactattcattctatcctagtagtgagagctcaagaaggagtatggttaccagtgaagctttcccatccttaggaagcctctctctctctccatattactgaaattcttcagaaaattctgagatgctctcagtgtttcattgttactttaatcttgattattataagactgatcactgtcacagctactgctgcagcagctggagttgcactacattcatcagtgcaaacagcagattttgtaaataaatggcaaaagaattctactctgctgtggaactctcaaactaaaatagaccaaaagatagttaatcaaatcaatgatctctgacatactgtaatgtggctaagagatcaaatagctagtttagaatatagaatgcagctaaaatgcgactggaataattctgacttttgtatcactcctcacccttgtaatgaatcagagcatgagtgggaaagaattaagaaacatttaaaaggtcatactggaaatttatctttgaatattgcaaaactgaaggaacaagtatttcaagcttctcaggcacatctgatgctaataccaggaactaaagtgcttgaaggagctgtggacaggttagcagctattagcccattaaaatggaatgggtgggaattgaacaatgggaacacatggacacaggaaggggaatatcacacactggcgccagttgtggggtggggggaggggggagagatagcattaggagacatacctaatgttaaatgatgagttaatgggtgcagcacaccaacatgccacatgtatacatatgtaactaacctgcatgttgtgcacatgtacactaaaacttaaagtataataataataaaaaagaaacttggaagttctgtgatttcaatgatgattgtgcttttaatctgtgttgtctttgtatagtctgtagatgtggatcccgaatcctgcaagaagtagccctccatgacaaagctgcctatgcctttattgctttgcagaaacataaagggggacttgttggttgcaagccctaagcctatcataaacaggccttaaagaaactggccataaacaggatttctgcagcaatgtgacatgctcatgatggctgtcatgcacactgctaaaagttgttggtttactggagcagggcaaggaacacctggccctgcccagagcaaaaaaccacccaaaccacaaatgatagcagagtggcctgtgctttgacagcatgtttttgctgcagataatcagccagagcctgtttctctgctgcttgctgagaatgctttgtttcccataaggaatgcttttagctaatcttgcttatcactggctttctgtcaataaatgtgcggttcaaactctgtttgagactcagctctgaaacctgggagacccctgatttcccattccacaccctctatttctgtgtgtgtgtctttaattcctctagtgctgggttagggtctccatgaccgagctggtctcaacaggtgcaggattcagcaacaattgacaatacccaaaatttgtggggtccccccaaaaagaggagagtcaaatcactgaggtgctggatacagtgatatatcacaatcttacctttggactgggcccagacagcaacatcaaaccactcaggtgctgaacataggcatatgtaacaatcatacccgcaggaaattccagtaatgaattaacaatcctgcacaggtcccagttctaggtatgagagtcaccacattttctatgttgggtctaagtatggtagtgaaaatctcaccaatgaattggattggtgcatgagagctttcattcctcctgtaaactgtgttcactctggccctaagcccagataaaattttcacagattcagatagaattcccacatgccaatgaactgggtttagaaataagtcatcattccaactttggctggatgttcacatatgacagttacaattttaactgtggactgtgtctgtgtgaaattcagggtctcaccagtggtctccatccatgtgtgagggtgacaatcctaacaattggtggggtgtacacatgagagccacaatttcacctgtgtgctgaaccctggaatgacactctctgtactacaagaaatttatatagtatgcaagaaagtgacaattctctatgactttatacaaaaaaaagaagacccaggatcataactacaacactaggcctagctataaaagacagcatctctcctactagatggtttgaggtacgagaatcaccattgcatctgtgagctaggccaaaatatattttacaatcccatctgtgaatagacagagagaaggagagtcacatcacctaggtttttggccaggaatacatcacaatctttactgagggcagggaccaaacaggagtatcacatcactttaatactcagccaggaatatgttgcaaccttctcctaaaagtaggacacaggcagcagagtcacatcacctgggtgctgagttcagcaacaggtaacaatgctttatatggtcaagacccatgcaggagagacacatcacctggcacctgggcctagtgataattcacaatttttcctgtgtgcagagtgcaggcaaaaatggagagtcacatctcataggtgactgatgcatagatatgtcagaagccccactgtagaaagggtccaggcagaagcctcttattttataggtgttggatctagtaatatgtcctaacatggaaaatattcagggcttaggcaaaaaaaaagggcggggtcacataacccgagtgcagaacttagcaaaatgtaacaatgcaccatgtgggcagtgccaagggaagaaaaaagactcacatcacctgggtggacggcccaggcatatgtcacaatgacacttgtgggcaacaccaaggctggaaaagagggtcacatctttgaggtgaagagtcaagatatatgtcacaagctcatctgtgggctgggccaaggcaggagagtcaaatcactaaaatgcatagcagacacaatcatacctgaaagtccaggaataagattagaaattccatacatgtccatgttctagatatgagagtcaacacctcctgtaatgttgggtctaaatacatgagtaacaatctcaatagctgacaaaatttttgcaagagagccacaatttcttctgcagactgtgttctctcagtgtaggcacagcctcatatgtgtgctgaagtttggtcagagtcaccagcccacctgtggaccagatccacatatgagagtcaattctccaactttcaacagactccatgtgtgagctccagaacctcaacagtgagatatgcttatgtgggagaatgacaatctttattgttgcctgagtgtgcattcaagagacactatctcacctgtgtgctgtgcactcctatgacactctgtgtcacctgagggctttatacaatatgcaagagtggtgatcctctgtgatcttcaaacaagaaggaaatccagattcttttcattggttctaagcccagagtcaacatccctctaattggctaagtccagataagagtcctcaccttcctatgagctgggtttagaaatgagtcaccatcagctgggcatgatgggtcatgcctgtaatcccagcaatttaggaggctgaggcagttggatcacctgaggtcacaagtttgagaacagcctgaccaacatggtgaaagctcatctctactaaaaatataaacaatgatctggacgtggtggcaggtgcctgtaatcccagctacttgggaggctgaggaaggagagtcgcttgaagccaggaggcagaggttgtagtgagctgagatcacaccattgcactccagcctgggcaacaagagggaaactccatctcaaaaaaaaaaaaagtcaccatctcaactgtggccagatgttcacatatgacagtcagagttccaactgtgaaatggattcatgtgagattcaggacctcaccagtgagctctgtccatgtgtgagggtgacaattctaaaggtgggtggggtgtgcataggagaaacacaatctcatctgcataccggaccctgttatgacattctctataacacactagggctttacagatgtgagagagtggtaattctctatgacttttatacagaaagaagacccaggatcatctttgttttcctaagcatagctatgagcaacatgatctctcctactggcttcttcgaggtatgaaagtcctcagtacatctgtgtgcttggccaagttatatgtcacaattccacctgtgggtaaagaacaagcactagagtcacatcaactgtgtgctgggccagggttatgtcacaatcttccctgagagcatgcaccagacaggagagtcatatcacagggttctcaaccagagatgttacaatcctctcctgaaagtagggcacaggaagaagagtaagatcacctggatggtgggccaggagatatgttacaaggatcgctgtgggcaaggcccagaaaggacagacaaaacacctggttgctgggcctgtcaatatgtcacagtcatctctatggcagaatgcaggcagaagtaaaggatttcatctcccaggtgatggttaaaaaaatacatcccaaagcactctgtgggaaggcctcaggcagaagccttccaactcctaggtgtttgtttcagtgatatgtcacaataaccaaaatatgcaggtctcaggcaagtgaggagggtcacaccacctaggtgctaggtcaagtgatctgttacaatcttttttttttttttttggcaatgctcaagcagaatagaaaagtcacatcaccaagataatgaacaaaaacatgtgttagaatatttctgtgtgagagcccatgcaggaaagtcacatcaccatgttgttggatccagagataacgttgtaatacatgatgcatgtgggtctcaggcaggagaggagagtaacatcacttaggtgcagggtgcacctaaattcacatcacaatttccccttaagcacaccccaagcagtagcagagagtcacatcacctaggttcttggtccagcagtatttcacaatacccctgaggggatggcctaggcaaacaagtcacattacctaggtgagaagcctagagatatgtcacaatgtcccttgtgggtaggtctcaaaaacaagagaagagacatagcctaggtgctgggctcagctttatgttccaatcaccccagttggaagaagccaagaatgaagaggagtcacatcacataggaattatgtcaagtggcatatcacaattcccactgtggacaaaccccagaagaaaggagtcacattatctaggtgggaggcccaaacatatgtcacagtgactcctgtgtgcagggaccaggcagaataatacaccactgttttacttgtcccagcaataagtccctctctattctgtggacatggccaaggcaggagaggaatgtcacctcacataggtaaaaagggcatctacctgagcttggtctataggagagattgtaatgggtcaagaaatatgtcacaatgctctctgtggtaagggttcaggcagaggactcacatcatcttagtactgggcccagtagtatgtcccaatgccttctaagggaacagccaaagcaaaaaaagtaatatcaccttactgttaggcacagtcgtatctcataatctcttttgtgagcagaaacttaaaaaaagaaaagtgtcagccgggcgcaatgggtcatgcctgtaatcccagcactttgagaggctgaggcaggtagatcacctgaggttgggagttcgagacaagcctgaccaacatggagaaaccatgtctactagaaatacaaaattatttgggcatggtggcacatgcctttaatcctagctactcgggaggctgaagtaggagaatcacttgaacctgggaggcagaggttgtagtgagctgagatcactccattgcactccagcctgagcaagaagagtgaaactccgtcaaaaagaagaagaaaaaaggaaagaaaagtgtcatatcagctaggtgctgggcccaacaatatgtcccaatacccccagtcattggggaacaggcaggaaaaataagtcacatttccagggtgattggaaagatgtatcttacaatgccctctgtagaaaggtccaggatgaagcattacctcacctggctgatggacttagcaatatgtcacaatggcctatgtaggtagggcacaagcatgagagtcacataatcaaagtgtgagacccagcaatatgtcacaataaacatgtgggcagcaccaaggccaaagaggagactcacatcacctgggtgcaaggttcagcaatatgtcacaatgacccctgtgggctttacaaggcagaatagagtctggttccagggatatatcactgcgagctgggcccagggaagagagtcaaaccattcagatgctgggctgaggtgtatgtcacaatcacacctgtaggaaggtcctgtgatgacattaacaataacacacatgtcccgagtgaagggatgagagtcaacacctcctccattttgggtctaaatacaggagtcagtctcaatggtggactgggtttgtgcatgagcctcaatttctcttgcaaactctgtgccttaaagttacagccacaaaggtgcactgaatcttggttaaagagtcaccaacccaactatggaaagaatccgagagtccattttccaacattcaactgcctccaaaagtaacattcagaacctcaaaagtgggttgtgttcatttaagtagatgacaatctttgctattaactgggtgtgaatatgactgtcgcaatctcacctgtgtgctcagccttgccagtacactctttttaccacctgggtgctttatatggtatgcaggagagttgcaatctgctctgagacctttgtacttctgtggattcttaatcttatgtggtcctaagtctaactatgagagtcaacatctctcatattgccagggtccagacaggagagtcctcacttgccaatgagctgggtttagaaatgagccagcatctcacctgggcatggtggcttacacctgtaatcccaacagtttgggaggctgaggcaggcggatcacctgaggtcgtgagttcaagaccaacctgaccaacatggagaaatactaaaaatacaaaaaaaaaaattatccaggtgtggtggcactgcccgtaatcccacctacttgggaggctgagacaggagaattgcttgaatgcgggaggcggaggttgcagtgagcagagatcacaccattgcactccagcctggacaacaagagggaaactccatgttaaaaaaaaaaaaaaaaaaaaagggtcagcatctcaactggccagatgttcagatatgatagttacaatttcaactgtggactggatctgcatgtgagaatcatgacctcatcagtgggctctgtctatgtatgagggtgacaattctaaaaataggcagaatgtgcttacaagaaacataatatttaggccaggcatggtggctcatgcctgtaatcccaacactttgtgaggccaaggtggacagatcatgaagtcaggagatcaagaccaacctggctaacatggtgaaaccacatctctactgaaaatataaaatattagccatgcatggtggcacgtgcttgtagttccagctactcaggaggctgagccaggagaattgcttgaacccgtgaggtggaggttgcagtgagctgagatttcaccactgcactccagcttgggtgacacagcgagactctgtctcaaaaaaagaaaaaaacatgatccaacctgctttgcagccctaaccaggactgaggcaggagcctcccattttaggagtctggctcagtaaaatgtcacagtaccaaatatgcagttctcaggcggaacagaagagtcacatgacctaagttcttgttccagtgatatgtcccaatcttgccttttggcagggaccagggagaagagagcagtcacatcacataggtgatgaatgaacatatatgtcctaatacccccatgtacagagaaaatgcaggacagttgcatcagctatttgctgaacccagtgatatgtcaaaatatgcaatttatgcagggcccaggcaggagaagagagtatcatcacctaggtgtcaggcacagtgacacattacaatatcttcttgagagtctaagcagtggagaagagcgacatcacctaggtgccgagtcaaaaaatatgtcagtcaggcatagtggctcatgcctgtaatcccagcactttgggaggtggaggcaggtagataacctgaggtcaggagttagagatcagcctggccaacatggtaaaaccctatctctaactaaaactatgtgggggttcagtcaggatggtgggagaaattgtaaaattataggaaataaagacaaacccttgtggaaggcctggggatttgcataaactgtttggctgaaggcagctgaattctcctaaaagttcagggcatagatacataggaatgtagactagtttacctaaataacttattcacaaatgtggttctaaaactaacctttgatagctcgtgggcaggatggctcttttagaggggaaggcgaccaggttgattaccctctattagtgttgactcaaagcgtttgtcatttaatgtgtgctgaataaatgccagcagggccagtgagtcagggccatggctgcaactctttacagccctctccttggagtctgtaagtggcccggaccctcagccgatctgagaagcacaatatctgtgtcagtgtacattattcatctgtcattgtgtcagggtctgcaggacaaacccctgcagctggtgccccatgtgaggaatgctgtgcagggagcacgacggacccccaaacaatggtaaaaaaggaactgcacagtcagtgagtaatcggtaagtcattggtgcccacatgagatttccaagtttggcggggattgttcaggctgaggtttcatcatgggacaacagttaccagctcagcggaaatagtatataaaagcattgaaatagctgcttaaagctagtggagcctcagttttgaaggctcaattaagggacctaatgcaaactgttgcaacccataacccacggttcccaaaagaaggcatgctggacatagagctctgggaacaagtggggagaaatcttaagcaacaccatgtgcaagggtaacgcatcccagtatcatctttaatattatgggctctagtgagggtggccttggtcccattatacacagaagagcctaaaaaggggaaaaaggaggaatcatcacctgccttaccacctccttctccctcagccccaaaataacaaagaagaaacagaggttttacctaagcctcctcctcaaataaataggaaaaaagatgagggatacactacagcaatgcaaccctgtcttaagcaagtagcattagaacgggagctattagcctgcccagtaatgtaaaatcaatgaggaaaccagttacataaagagttgagagaccaggcacggtggctcacccctgtaatcccagcattttgggaggctaaggcaggcagaacatgaggtcaagggatcgagaccatcctggccgacatgatgaaaccctgtctctactaaaaatacaaaaattagctgggagtggtggcacacgcctgtaatcccagccactcaggaggctgaggcaggagaatcacttgaaaacccgggaggcagaagttgctgtgaaccaagtttgcaccattgcacttcgacctggcccagcctggtgacagagcaagactctgtctcaaaaaaaaaaaaaaaaaaagagttgagaaaaggcattagaggccacagctgtgcagccaagcaggcagcgggcagaagaaaaggtttggcagcagggaagctcacagacatggtgccagcaaatgctcccaaaaacagcctgtgtggtgtcgaggatggggagccaggcccagcatgccagacctagcctgctaaggaggggtggaaggcgtgcacgggaaggtctgccaagccagcagcagcctggtggtgggggaagggagcagcacaagcgaaaagtggcacaggcaaaaagtggcgcctaggcaagtgcaacatgacagccaccccaggacccgcgctgctgccctccaactccacgggcagcccacagcaaaatttcatgtgttccttgtatacaagctatcaggcctctgagcccaagcctgcaagtacacatccagatggcctgaagcaactaaagaaccacaaaagaagtgaaaataattcctgccttaactgatgacattccaccattgtgatttattcctgccccaccctaactggtcaattgaccttgtgaaattccttctcctggacaatgagtctcacaacctccccactaagcaccttgtaacccccatctctgcctgcaagagaaaaactccccttgactgtaattttccactacttgccctaatcctataaaactgccccactcctatctccctttgctgactcctttttcggactcagtctgcctgcacccatgtgattaaaaagctttattgctcacacaaagcctgtttggttatctcttcacacagacatgcgtgacatttggtgctgaagacccgggatgggggactccttcgggagactggtcccctgtcctcaccctcactccatgaggagatccacctacaacctcgggtcctcagtccaaccagcctaaggaacatctcaccaatttcaaatcaggtaagcggtcttttcactttcttctccagcctctcttactacccttcaatctccttgtccttccaattccagttctttttcatctctagtagagacaaaggagacacattttatccatgaacccaaaactctggcaccagtcatggactcaggaagacagtcttcccttagtgtctgatcatcatggggatgcctgccctgattattcacccacattccattggtgtctgatcatcgtagggatgcctgtcctgatcacccacattccattggtgtctgatcaccgcagggatgcctgccttggtcattcacccacattcccttgctggcaagacaattgtggggatgcctgctttggctgctcacccatgttacagcccagggctgctcaccccacacccttctccacatctctacccttctcttcaaacttcactatgggttaccttccaccctccattcccccttcttctcccttagcctgtgttctcaagaacttaaaaccttttcaactcacacctgacctaaaacctaaatgccttattttcttctgcaacactgcctggccccaatacaaacttgacaatggttccaaatggccagaaaatggcacttttgatttctccatcttacaagacctggatgacttttgtcaaaaatgggcaaatggtctgaggttctagacatccaggcattcttttacacatcggtccctccctagtctctgctcccaatgtgactcatcccaaatctttcttctttctctcctgtctgttccttcagtctccaccccaagttctgagtcctttaaatcttccttttctaaggacccatctgacctctcttctcctccccaggctgctgctcaccaggatgagccaggtcccagttcttcctcagcctctgttccccgaccctataatccttctatgacctccccttctcacacttggtccagcttacaactttgttccacaactagctctcccccacctgcccaaaaatttcctcttaaagaggtggctggagctaaaggcatagtcaaggttaatgctcctttttctttatccgacctctcccaaatcagttagcatttaggctcttttacatcaaatataaaaacccagcccagttcatggcccgtttggcaacaactcttagatgctttactgccctagacccagagaggccagaaggccgtcttattctcaatatgcattttattacccaatccactcctgacattaaaaaaagccccaaaaattagattccagctgtaaaaccccacaacaggacttaattaacctcaccttcaaggtgtacagtaatagagaagaggcagccaagcggcaatgtatttctgagttgcaattacttgcctctgctgtgagagaaaccccagctacatctccagcacacaagaacttcaaaactcctaaactgcaggggccaggtgttcctccaggacctcctccccaggatcttgcttcaattgccagaaatccggccactgggccagggaatgcccgcagtccaggattcctcctaagccgtgtcccatctgtgcaggaccccactggaagttggactgtccaactcacctggcagccactcctagagcccctagaattctagcccaaagctctctgactgactccttcccagatcttggcttagtggctgaagactgatgctgcccaattacctcggaagcctcctggaccatcacagatactttgagtaatctcttatagtggaaggtaagtccatccccttcttaatcaatatggaggctacccactccacattcaagagtctgtttcctttgcctccgtaactgttgtgggtattgatggccaggcttctaaacctctttaaactccccaaatcttgtaccaacttggacattcttttatacactcttttttagttatccccacctgcccagctcccttattaggttgagacattttaactaaattttctgcttccatgactattcctgggctacagccacacctcattgccccccttttccccagttcaaagccttctttgcattctccccttgtgtctccctaccttaatccacaagtatgggatacctgtactccctcctttgtgatcgatcatgcaccccttaccatcccattaaaacctaattacccttaccccactcaatgccagtatcccatcccacaataggctttaaggggactaaagcctgttatcactcgcctgttagagcatggccttttaaagcctacaaactctccttacaactctcctatcctacctttccaaaaaccagacaagtcttacagtctcgtccaggatccgcatcttatcaaccaaattttcttgcctatccaccccatggtgccaaacccatatactctcctatcctcatttcctccctccacaacccattattctgttctgtatctcaaagatgctttctttactattccttcacacccttcatcccagcctctttttgctttctcttggactgacccttacactcatcagtctcagcaactcacctggactgttcgccccaagggttcaaggagagcccacactactttggccaggccctttctcattatctgctttctgtttgctcatctgccttccaccttattcaatattttcatgatcttctttgtagcccctcttaccaatcttcccagcaggacactatcctgcttcttcaacatctctactcaaagggatacagagtatccccctccaagacacaaatttcttcccctagcattacctatctcagtataatcttccattgacatacacgtgccttcccgtagaccaggttcagttaatctcccagaccccaatccccaccaccacacaactcctttccttcttaagcattgttggttatttctgactctagataccaggttttgctatcctaaccaaaccactttacaaactcacaaagggtaacttaactgatcccacagaccataagtcttttccccattcttcttttcactctctcaaaaaggccctggaggcagctcctacactagcactccccgacttatcccatcctttttccttacacacagctgaaatacaaggctgtgctgctggagtcctcacacaggagccaggcccatgacctgttgcctttctatcaaaacaacttgacctcacaattctggggtagccctcatgtctatgtgcagaagctgccactgctttaatacttttaggcaccctcaaaatcacaagctatgctccacttactctctacagttcccatagctttcaaaatctatttccccctttcctgttccccacccagaccacacttggtttactgatggtagttcttccaggtccaattgccaatcaccggcaaaggcaggttatgctatagtgtcttccacatctatcattgaggctacagccctgcccccttccactacctctcaacaagcagaactcattgccttaacttaagccctcattcttgcaaagggactagctgtcaatatctatactgattccaagtatgccttccacatcctttaccaccatgctgttatatgggcagaaagaagtttcctcactacacaggggtcctccatcattaacacctccttaataaaaactcttcttaaagctgctctacttccaaggaagctagggtagttcactgcaagggccatcaaaaggcatcagatcccattgctcagggcaacgcttatgctgataaggtagctaaagaagcagttagcattccaactttggtccctcatggtcagtttttctcgttctcatcttttcactttacatttccagttatgccttacaaaggtcccttcttcctctgtggctcctccacctacatgtgtctacctattaattggacaggcacatgtacactagtttcctttactcccaaaaatcatttcacaaataggactgaacagcttcctgttcccctcatgacaccaacacttcaccactattttgttttatttttcttattagtataagaagacagaaataggccttgaattactgctgaaaaaggaggactctaaatttttaaatgaagggtgttgttttgacctaaatcaatctggcctggtataggacagcataaaaaaatcacaaggattgagccccaaaactcaccaaccaagcaaataattacactgaaccccttgggcactctctatttggatatcctgggtcctccccaattcttagtcctttaatacctgtttttctccttctcttatttggaccttgtgtcttctgtttagtttctcaactcatacaaaactacatcaaggccatcaccaatcattctatatgacaaatgctccttctaacaaccccacaatataaccccttgccccaaaatctttcttcagtttgacctctcccactctaggttcccacgccacccctaataccacttgaagcagccctgagaaacatcacccattatctctccataccatcccccaaaattttcaccaccccaacacttcaccactattttgtttgttttccttattaatataagaagacaggaatgtcaggattctgagcccaaccctgcacatacgtatacatccagatggcctgaagcaactaaaaaaccacaaaagaagtaaaaatagccaattcctgccttaactgatgacatcccaccattgtaatttgttcctgccccaccctaactggtcaattgaccttgtgaaattccttctcctggacaatgagtctcagaacctccccacagagcaccttgtaacccctgccctgcctgcaagagaaaaaccccctttgactgtaattttccactacctacccaaagcctataaaattgccccacccctatctccctttgctgactcctttttcagactcagtctgcctgcctccaggtgattaaaaagctttattgctcacacaaagcctgtttggtcatctcttcacacggacatgcatgacacaactgatatcccagattataattctgtgctaagatttaagtaaaatttaagaatttaaaagacctctttctaataatggccactgtttttatctctctcttacccctaatgtgactctctccatttccaatttaagtaaagcagtagcctctgaaggtagagaaattacaaatggctcatgaattacttgaaaagcaagtaaaagctgggcatgtagaaccatctaatagtccttagaattcacccatttttgtcatccccaaaaagtcaggtaaatggaggcttttacatgacctacatgctattaatgccaacttgcaacctatgggaccccttcagcaggggttcccttccccatggcagttcctcaagattggcctataatcattattgacttaaaagactgtttttatatgattcccctagcagaacaggacaaagaaaaatttgtgtttacaataccagctatcaataatgaaaggccagcttgtcaattttattggaaagtgcctcctcaaggaatgctaaacagtcctaccatgtgccagtatcctgtaaataaagctttgctccccagtataaaagaatttcctgattgcaagattattcatttgatggatgatatattactaacagtcccaatggagctgctacttttaaatttatttacctctatcataaagaatacagttaagaggtttactcatagcacctgaaaaagtacaaatgtcctctccttggaaacatcttgggtacatactaacttccaagtcagtaagacctcaaaaagttaaactaaatactagcaacttacatacagtaaatgattatcagaacttactggtcaatattaactgactctaccccactttggggattcctactgataagttacaaaacctgttttctatcttaacgggcaatacagccctagattatcccagaaatttaacccctgcagcaaacaggggaaattgaggaaatagaacaatccatctctcagaggcagctagattgcatatatccaggctactcaattcagtaaaacactcccctagagggttaataggagagataaccccagaactgtgcttcctagatagtttttttgctcatatactgggactaaaacactctttccctatatccaattactcagtaaagtcatctattcaggccacaaacgatgcagtcagttgctagattatgatcctgatatcatcaggattcctttaagtaaaaggcaattcaaagcagtattgccagtatctatcgatctgcaaatagctctctctgattacccaggacatatagagcatgtccttcctgctaataaactccttcatttcttatcttgtactcctgtgattttgcctacaaaaatagttcacttccccatacctaatgctttaacactgtttactgacggttcaggtaaacatggaaaagtggcagtgtggtggagaccataaaattcactcactcaatctgggtttactttcactcagagagctgatattggggccctgatattggccttggaaactttttccactcagctcatcaatattgtgagtgactctgcttactctgtttacttattgcagaatcttgagacaaccttaattaagtccactctaaagtctgccctgtgtgctctttttctctgacttcagcaattgctagatcaatgtacacatcctatttttatgggcacacattcgatcccacagctcactgccttgcccattaacttatggcaattatcaagcagaccttcctgttataacatcactgcttaaccaagccagcaaatcacatcaattcttccaccaaaattagaaaaacttatctaaacaatttcaacttacccagaggctggctaaacaaattatcctgcaatgctcagcttgccagcttacaggcatgtcccctccttcaacaggtctaattagtgcacacgcccttcccggaaagtccactcaatatgtcattaaacatcttttaacttttgtgtttatggggtggcccacaacaattaaaactgataatggtccagcttatgccagctcacaatttcaacagttttgccacacgtggaatatccaacatttcacaggcatcccatataatccccaaggacaagccatagtagaatgtgcccattccactcttaaaaatatgctcaaaaaacaaaaaagagggagtatgggtaaagaccctggaacactattggcacaagccttattgacccttaattttctaaatttagatgataaatttcaatcagctgtagaaaagcactttgctaaaacctctcaagacataaaacctgcagtttttgttaacgtggggaagaggatatgcttgtgttcataccccctcaggtcctctttggattccagcacgatgcatcaaaccataccatggcatgcctaggacccaaccccatatcagaaatgaagaaactgaccttacagtacccgcagccctgaacaaagcagcttccacagatgacacaagccccggacctgggggatgctgaagaggacaactcaggaggctgaacgaatcctgctctggacactgacaccaattactccaggaaattttttccttgctatgctttctgtgtatattgcaactcacatagggtattgatcctttttgtactcttgctttgctggccacctgtacctgctacactctattaggctcatacttgaacccacctttcttttgccctgtcacctggggagacatccccttcccagcctttaataatgtaactgctggccgggcgcggtggctcacgcctgtaatcccagcactttgggaggccgaggcgggcggatcacgaggtcaggagatcgagaccatcctggctaacacggtgaaaccccgtctctactaaaaatacaaaaaattagccgggcgtggtagcgggcgcctgtagtcccagctactcgggaggctgaggcaggcgaatggcgtgaacccgggaggcggagcttgcagtgagccgagatcgcgccactgcactccagcctgggcgacagagcgagactccgtctcaaaaaaaaaaaaaaaataaataaaataatgtaactgcttggctaagagggatagatttactcctagtagggctccatagtaacagcacacatagaactgaagtgtcaaataacactacaggtcactctttgactggaaaaaaatgttgctaattatactcatgattgtcttatgttatttgctaattctaggatgcaaagttggaataagagcaatgaccacctctcctgagagacctgtttgttcccacatctgtactcttcagtcaacagaacctgatgcaaagaacagaaaaggggaagatgtgggggattcagtcaggatggtgggagaaattgtaaaattataggaaataatcacaaacacttgtggaaggcctgggggtttgcataaaatgttgggctgaaggcagctgaattctcttaaaagcttagggcatagatacacagaaatgtagtttatctaaatgacttgtttacttatgtggtcctaaaactaacctttgatagtttatgggcaggatagctctctcagggtagggggagggcaaccagattgattacccactgatggtgttgactcaaagccttcgtcatttaatatgtgctgaataaatgccagcagggccagtgagtcagggccacagctgcaactctttacagcactctcctttgagtctgtaagtggcctagaccctcagccggtctgacaagcataatatctgtgttagtgtacattattcatccatcgttgggtcagggtctgcaggacagacccctagaaaaataaaataaaattaaaaatagccgggtgtggttacacacacctgtaatcccacctacctgggaggctgagatagaatcgcttgaacacaggaggcagaatttgcagtgagccgagatcatgccactgcactccagcctgcgcaatagattgagactctatctctatatatatatatgtgtgtgtgtgtgtacgtgtgtcacaggagagtcacgtaacctagaagctgggtaaacctatatgacataatcatccttgtggacagggtacaagaagaaagtcacatcacataaatccttcaccaagagtcacaccatttaggtgatgggaccagagatgtgtcacaatagtccatgtaagcagagatcatgcagaaggaagaaatcacctgtgtgttgggtgtagcaataagtcactctattttctgtgggcatggcccagacagaaggggagagtcacatcatctaggtgcttggcccagagatacgtcacaatctctactatgggcaaagccaaggtaagaaaggagagccacatcaaattgttgataggccaagaaatatgccacaatgccccaagtaggcagggtctgagcaggagacaaatgacattcatgttgggcactgcaatatgtcacaatgtcttttgagggcaggccaggcaaaataaccttggtgttgggcccagcaatacgtcagttttcttgcagaagagaagaatcacatcagctcagtgctgaaaccagcaatacatatcgttatcccccagtgagcagggatcagtccagtgaaaagattcacatcacctatgtgatccacacagaaatgcatcacaatttccctagaaggcagtgccctggaagaacggttacatcacgtgggtattgaaagcagctatacttcacaatggtctatgtaggcaggccataggtggcaaagacccatcacctgggtgctgagtccaaggatatgtcagaattttcctgagagaaaggctcaggtgggagagaaacaccttctaattgctgggcccagtgatatgtcacaatcttctctgtgggaagaatgcagataaaagaggagagtcacacctttctaggtaatgaagacagagacatgccatcaagcctcctgtgggcaaggcacaggcagaagcctctcatcccctaggtgttgggcccagagatatatcacaatactcacaatatgccatgccctggcaatagaggtaagtcacattacctaggtgctgggtccagagatatgtcacaatccctattttgtcaaggcccaggcataaatggagagtcacatcacctgagtgaaaaatgaaaagatatgtcatcatacccttgtgggctaagcccatgcgggagggtcacttcacgtaggtgctggccccagtgatgtgtcacaatacataatgtatgcagggccaaggcaacagaagagtaacattacctaggatactagcccagtgatatatcaaaatctttttctgtcagtagagagtcacataacctaggttcttagtccagcaatatggcatagtaccccttgaggggagggcctaggcaggagagtcacatcacttaggttagcagccaagagacatgtcacaatgtccactgtgggaagggttcaagaaaagaggagagtaacataacctagcggctaggctatgtgtgataatcacctcaggtgatccacccgcttcggcctcccacaatcctgggattacaggcatgagccttctgccttgttttagatggagcctcactttgtcacccaggctggagtgcagtggcatggtctcagctcactgcaaactctgcctcccagattcaagcaattctcctgcctcagcctcccgagtagctgggactacaggcacgtgccaccatgcccagctaattttttgtatttttagtggagacagggtttcactgttttagccaggatgctctcaatctccagacctcatggtccgcccaccttggcctcccaaagtgttgggattataggcgtgagccaccttgccaggcctgcccttcttttaagaagaaactgtggctggtcacagtggcttatgcctgtaatcccagcactttgaaaggctgaggcgggcagatcacctgaggtcaggagttcgagaccagcctggccaacatggtgaaaccccatctctactaaaaatacaaaaaattagctgggtgtgatggtgcaggcctgtaatctcagctactttggaagctgtgacaggagaatcacttgaacccaggaagcggaggtagcagtgagctgagatcacgcaactgcactccagcctgggcaacaagagcaaaactccatctccccccacccccaaaaaacagaaaagaaaaagaaaaagaaaagaaagaaggacagaggcagtagagtcacgtcacgtgggtgccgggctcagtgatatgtcacaatgctccctgtgagcaaagcccaggcaggagaaacacatcacctgatttctgggctgaaaaatatgtcacaatctcttctttatataagcaaagccttggcatagcaagagagtcacaacaaatagttgattttcccaaaggtatttcacaatgctctgttgtcagggttctgacaggagaccctcatcaccttgttattgggcccagaaatatgtcacaatgccttttgaggtctaggccaaggcagaacagtaatttcacattggtgctgagccccacagtatgtcccaatctcttatccaagcaaaacttatgatgaaaagaagagtcaccctgttggtagtgggccaagtgatatgtcacaatccctagtttttggagaaaccaggcagaagacagtcacatcacctgggtgatggatggaaagatatgtcactatgccccttgatggcagaacccaggcagtagagttaaattaccagggtgtttgacccagcagtgttttacaattgcttatgtggcaaggcacagcaaggtgtcacaatgtcccttgcaagcagcactaacacagaatagagtcatataccctcagttctgggttcagcaaaatgtcactatcccatctgtgggctggaccatgcaagagtcagatcactcagctgatgaacagagaaaaatgtcacaattaaacctgcaggaggttcagggatgaaattaacaatcccacacatgtcccggtattaggtataggaggttaacacttcctatatattgtgtctaagaacaggagttacaatggcaatggttgactgaatttgtgcatgagagcctcaactcctcctgcagactgtctaattagtgaagtcacagcctcataggtgtgctgaatcttgctctgagtgtcaccaactcaccagtgaactggatccacatctgagagtcaagtttccggcctttgactgcctataggtgtgagattcagaacctcaaaagtgcgctgtgttcatgtgggaaaatgacaatgtatactgtgtgtgggtgtgcatacaactgtcacaattttccctgtgagctgggccctgttagtacactctctatactacccaaaggctttatacagtgtcaatgagaatcacaattcagtctgagatcttcatctttgtttccccaagggagaatcttttccccccccaccaagatggagtcttgctctgttgcccaggctggtgtgcagtggcacgatctcagctcactgcaacctctgcctcctgggttgaagcaattttcctgcctcagcttcccgagtagatgggattacaggcatccaccaccatgcccagctaatttttgtatttttagtagagatggggtttcaccatgttggccaggatgtcttgaactcctgacctcatgatctgcccgccttggcctctcaaagtgctggggttaagtcgtgagccaccgtgtctggccagatcttcatctttgtatgcaaccacaaccatacctatggccctatgcccagatattagagtcaacatctctccaattggctgggtccagatagtagagtcctcactgcttatgttctgggtttagaactgtgtcatcattcaaacagtggttggatgctcacatatgacagtcacaattccaactatgggctgtgtttgcatgggaaattcaagacctcagcaatgggctctttctctgtgtgagggtgataatcctaatggctggtgaggtgtgcatataagaaacaaaatctcaccaatgtgctgtgccctgtgataacactctctctaacacttgaaggcattatattataggtggggttgtggcaatcctgtatgacctgcatacaaagagaggacccaggatgttgctcatttttctaagtcgagctatgaaagacagtatcttttctaatagctgatttgattaatgaaagccatcatcacatttgtaagctgacaacagtgtatgtcataattaggtagggacctagcaggagagtcacatcacctggatttcagccaaggatatctcacaatcttccctgagggaggcagccaagcaggagtgtcacatcacctgggtgctcagctagggatatgttacaattctctcctgaaagcacagcacaggcaacagactcatgtcacctgggtgctgagctcagcactatgtcacaatgctcgctggggtcaagacaaagacagaagagccacatcacctggtgtctggttccagggatatgtcacaatccttcctgtgaaggggattataaaatgtcatatcttctaggtcatggatgcagatatatgtcacaaggtccctgtgggcagagcccaggcaggaacatactatcctataggtgttgggcctaatgatattttaaaataaccaaaatatgggaggcccaggcaaaacaggagagtcacatcacttacatgctgggtccagtgatacgccacaatacccctttttggcagggcctaggcagaagaccattacattgcctagttgatgaatgaaaagatatgttatgtccgggcacggtagctcaagcctgtaatcccagcactttgggaggccgaggcaggtggatcacaaggtcaagagatcaagaccatcttggccaacatggtgaaaccccgtctctactaaaaatacaaaaatcagctgggcatggtggcaggcacctgtagtcccagctactggggaggctaaggcaggagaatcgcttgaacctgggaggtgaaggttgcagtgagccgagattgcaccactgcactccagcctggcaacagagcgagactccgtctcaaaaaagtaaaaaggaaagatacgttataatacctctgggctcaaaaatatgtcaaaatgccttatgtaggtagggctctggaaaaaaaaaaaaatcacatgacctaagggctggggtcagctacaagtaacaaactccctagttggcaggacccatgcatgagagaagagtcacatcacttaggtgctgggctcagcgacatgtaacaaagctttttggcagggcccaggcagaagaggagtgtcacatcacctaggtgattaataaaatgatagctcataatacccctatgggcagggcccacgcaggagagttgcattatctaggaggtggagtcagtgatatgtgtcaacacacaatgtgtgcaggtcccaggctggagaggagtcacctcatctaggttattgacccagtgatacatcacaattattttttgggcagagaccaaacaatagagaagagtcacatcacctagatgctgggcccagctatgtatcacaacaccctgagaagagggcccaaacaaaagatttgcatcacctaactgagggtctcagacatatgacacaattcccgctgtgggtagggctcaggaagaactgtagagtcacataaccttggagctgggcccaactatatgtcaaaatcatctcagtgagtggggaccaggaataagaggagagtcaaatcatgaaggtgaagggccaagcaatgtcacactccccagtgtggacaggtcccaggaggaagagccacataatgtcagtgatgggcccagatatatgtcacaatgaattccgtgagccagaagaagaatcacatcacccgtgtgctaaactcagtaataagtcactctctcctctgtgggcaaggcacaggcaggagaggagagtcacataacctctgttctgggcccaaagttatgtcacaatctctttttgggcaacatccaggtagagagaagagtcacataaaatagtaaatggcccagagatgtatcttgtaggtaccttgcaggaagggtcaggaaggagactcacatcacattgcttctgggcccagcaatacatcaccatgccttctgagggcagtggcaaggctaaagagtaacgttactttagtattagacccagtgacatgtcacagtatcccctgcaggcagaacctaagacaaggaggagagttatgtcagctaggtgccaagcccagtgatatgtcacaatcccttctgtgagcaggagccacgtaggagaacagagtcatattacctgtgtgatgggtgcagggatgtcacaatgtcctctgtaggcaggacctaggcagtatggttacctcacctgggtgtgtgacagagcaatatgtcacaatgacccacatgggaagagcacaagcagaagagtcacataacctgagtgtggggcccagcgatatgacacaatgccccctgtggaagagacaaggcaggagagaagattcacaccacctgggtacaaactcagtgatatgtcacaatgtcctctgtgggcagtgccaaggcagtagaattgtcacaccacctctctgggtccagggatatgtcacaatcccatttgtggcctgggcccagggaggagcatcaaatcactctggtgctgggtaaagtgatatgtcataatcacaccagcaggaatgtttagggatgagattatgcatctggactggaaagaatcaacacatcaaaaatattaccagactgtgcaagatggctcatgcctgtaatcccagcactttggaggccaaggtgaggggatatctggaggccaggatttggagactatcttgggggcaatgtggtggacgagacctctattgaacaataataataaaagtttaaaaaagaagctgggtgtggtggctcacgcctctaatcccagctactcaggaggctgaggcaggagaatcgcttgaacctgggaggtggaagttgcagtgagctgagaatgcacaattgcactccagcctgggggacaagagtgaaactccttccccccaaaaatgaatgaatgaataaataaataaataaatccgaggtcaactgggtgcagtggctcatgcctgtaatcccaaaactttgggaagatgaagcagacagatcacaagggcaggagttcgagaccagcctggtcaatatggtgaaaccccatctctactaaaaatacaaaaattagccaggcgtggtggcgggtgcctatagtcccagctactcaggaggttgaggcaggagaatcgcttgaacctgggaggtagaggttgcagtgagccgagatcatgccactgcattccagcctgggaaacagagtgatactccatctcaaaaaatatatatattaatattaataattctgaggtcctagagaaaaacagtcttgagtcaaaaatacaaaagacctatttagcagttagaatagtttgtatatatttcaactaggcaggaaaagaatttacatacaaaagttttgtacagaaaatgatttaagaaaagaaaagagaaaaatctctgcccttattttcaagaagggtgaagcctgtatttgtaatttgtatctttttttacaacatccaggtctagggccataatcttgaactcatggacatctgaattctagtaggtgctagattcaggaacctgagggctggccttgggcacattctgcacatcaaaaagtgtttgtggggaagtaaaagacagaagagggaaagatgctatcaataactcattaataggggacagtgcatggtaactgggaggactcttatgctacagatactaaccaaggcagggctatattctgacatattcctgtgtccatgcaggcagatgagattacgattggtggctcacaagcccaggttgatgaagagatcaggttgtgctgcagtttcacggtctggaatagagattagccaggagtcctctatgaacttgtataattttttggtgagaaattctaggggcaaaggcactatacacataattcctgagagtcaaagtacacttatggtatgtgtacacttatggtacacaaagtacacttatggtatgtgaaatacacttatggggttgggcacggtggctcacgcctataatcctagcactttgggaggccaaggcaggtggatcacctggggtcaggagttagagaccagactggccaaaatggtgaaacactgtctctactaaaaatacaaaaaattagctggaggtagtgacacatgcctgtagtcccagctactcatgaggctgaggtaggagaactacttgaacccaggaggcagaggttgtagtgagcgaagatcatgccattgctctccagcctgggtgacaagagcaagactccgtctcaaaaaaaaaaaaaaaaaaaaagaaagaaaaagaaatacactacttatggatttcctgaaggtcaaaatacacttatggtatagtgttgtatgttggagagaggaagatggcctcatttccaaaatttgagaatgtaggaacaaaagtggaaatttacaattttactgcaagcctgagttaggctaggggaaaacggtggtggcttagaggccctgcttgtcatacattagaaagaccagtcttcctgtggagagttaaaataattaaaccactctccctctccctctctctctccctctccctctccctctttcttctgtctccctctgttgccgaggctggactgtactgctgtggtctcgggtcactgcagcctccctgccccgggctcccgtggttctcctgcctcggcctgctgagtgcctgggactgcgggtgcacgccgccacacctgactgatttttgtatttttggaggagacggggtttcgccatgttgacctggctggtctccagctcctgacctctagtggtctgcccacctcggcctcctggggtgctgggattgcagacggagttctcgctcactcagtgctcagtgttgcccaggctggagtgcagtggcatgatctcggctcgccacaacctccaccttccagccgcctgccttggcctcccaaagtgctaagattacagcctctgcccagccgccaccccgtctgggaagtgaggtgcacctctgcccagctgccccatcagggaagtgaggagcacctctgcccggccgccccatctgggaagtgaggagcccctctgcccggccgccccatctgggaagtgaggagcgcctctgccaggccaccccatctgggaagtgtacccaacagctctgaagagacagcgaccatcgagaatggcccatgatgatgatggcagttttgtcaaaaagaaaagaaggaaatgtggggaaaagaaagagaggtcagattgttactatgtctgtgtagaaagaagttgacataggagacatcattttgttctgtactaagaaaaattctgccttgggatgctgtgaatctataaccttaaccccaaccccgtgctctctgaaacatgtgctgtgtcaacccagggttaaatggattaagggcagtgcttaaacagatgcttgaaggcagcatgctcattaagagtcatcaccactccctaatctcaagtacccagggacacaaacactgctgaaggccacagggacctctgcctaggaaaaccagagacccctgttcacgtgtttatctgctgaccttctctccactattatcctatgaccctgccacatccctctctgagaaacacccaagaatgatcaataaatactaaaataaataaataaataaataaaaataattaaacagcgggaaattagactgaagtggctctagtgccctgtgttcataagtaaaacatctaaaacctaactaatgcatttcttataaattactctcttagggagaaaaaaactcaggcctaagtgattataaacctgcaattaacctctggttacaaaaccaggaaatttacacctggatcatacaaataaggtaactacataactgtaatccattcttgaatctggtttgccttctcaagcactttataaaaccctttttttttatccccctcaggtggaccacaaatcagggccgggtgctttccatttcaccaatcacggtttgttcaaataaacccgttaatgttttaacattgactccctttagttttaacagaagagaccatgcacctggtggctcaggcctgtaatcccagcactttgggaggccgaggtgggcaggtcacttgaggccagtagtttcagacaagcctggtcaacatcgcaaaaccccgtctctactaaaaatacaaaaattaaccaggcgaagtgcaaaggtaatcccaactattcgagaggctgaggcatgagaattgcttgagcctgggaggaggttacagtaaaccaagatcgcaccactaaagtttactctgggagacagagtgagcctctgtctctccatcttaacaaaaaaaaaataacaagagagaatgaagaccccatgggccacagctcctcccatgcacacaccaagtcaggattctgccctgatgacccccctggcatccctgaacactctgggaaatactcggggctgcaggtgcagagctgcccagagagctccatgtagggcgccccccaggcaccaggtgcgatgccagggtcctggctgcaggcccacctgccatcttgcagccagagggcctggggaggagccgagccagtggggactcaggacggcaacatgggagcagactctggggaggccggtcccgtgatttcacagcctggtctcccctctctggatgcccaaccctgcatactcaccatttcccagcttccaggatgtcctggcatcttagctatgcgtctcccaggacctgcatcacagggcaacagaggctgtgacagagtcactgggggctcccaaggaggaggacgcaaaaccggaagaggacgcagaacagtggaaatgaattccaagctctggagggagggagaaaaaggcccaccaaatgctagaagccacgccctcctctctgagagcctgattgggcagttcccatgccagcaccactgattggataaagctccaggacccacatcccacctccaccctccccagcattactgcattttatggactgggaaacaggttcaagtatgcagggtcacatgcccagagtactgcaactaattaagaagagagctgagacttgaaatgcacttgcttttttccttacctgggttggcttgtataatgcaccttattggctaattaagggtaagaagaggaatatttagacaacttttttaaaaagttttttttttttttttggccaggttcagtggctcatgcctgtaatcccagcactttgggaggctgaggcaagctgatcatgaagtcaggagttcaagaccagcctggccaaaatggtgaaactccatctccactaaaaatacaaaaatcagctgggcctggtggctggcacctgtaatcccagctactcaggaggctgaggcaggacaattgcttgaatccaggagtcagaggttgcagtgagctgagatcgcgccattgcactccagcctgggctgtgaatccagcaggaccagccacccaacagtcagctcccagtcgtgacctgagtccctggtggtgcagctctgctccaggcccctctggctgcaagatggtgactgggcctgcagctgggacccttgcatccttccccatccctgcacggccccctatctggaactctctgggcagtgttaggtacagtgagttcctcttcaaagagtcaacttgttcagcttccttgttctttgatctcaattttcaaagcctaacttcctcattctttgcagctccttgcccctagttatggtaaacaaccttcccaccagtcctaatctataactcacatctgttcccttgattacccgctctgtaactgaccttctgtccaaactgctcttactgccactgtaacccacacctctgccccatttgaaatagccaatcaggattagcttagattgtgcattccagccccaatgacacagcaacggggactaactgttttagggataaaagccccttcccttccttgttcgatatgctcttgcaattgtgactggcacaagctgcaaccttctgcagaactaaattgccttgctgagaaagctttttgccagagtgctgattctcctttgtgggactgagcatttgtttctaacagcagctctgcacctgcagattgttcccagagtcttcccagagtgttcagagatgctagacaggtcatcagggcagaaactcaactcagtgtatgtgtgggaggagctgcagccctggggtccccagtctctctggtgtcgagaccagcttggccggggagaccctaacccagtggcactagaggaattaaagacacacacacagaaatatagaggtgtaaagtgggaaatcaggggtctcacagccttcagagctgatgtgggcagcaagtcacccaggtgccaaggcaagagaccgaggacacaagctgttccagtataataaagtataaaacaagaatagttataccagatatacatcttagatatgattatatatgaatatcattgatcattagtttgtagcaattactctttattccaatattataataatccttgctctataatcataacctaggaaaaaccaggccgtacagagataggagctgaggggacatagtgaggagtgaccagaagacaagagtgcgagccttctgttatgcccggacagggccaccagaggactccttggtctagtagtaatgtcagcgtctgggaagacgcccattgccgagcggaccgtggtctagcggtagcctcagtgtcaaggaaaaacaccggctacttagcagactgggaaagggagtctccctttccccgggggagtttagagaagactctactcctccacctcttgtggagggcctaacattagtcaggctcacctgtggttatcctgaggcctaaccatctccctgtgatgctgtgcttcagtggtcatgctcctagtccaccttcgtgttccatcctgtacacctggctctgccttctagatagcagtagtaaattagtgaaagtattaaaagtctctgatatgcagaaatagtggcataagctgtctttctctctgtctctgctccctctctgcctcagctgccaggcagggaagggccccctgtccagtggacatgtgacccacatgaccttacctatcattggagatgactcacactctttaccctgccccttttgctttgtatccattaaataacagcacagccagacattcggagccactaccggtctctgtgacttggtggtagtggtcccccaagcccagctctcttttcttttatctctttgtcttgtgtctttatttctacactctctcacctccacacatggggagagacccaccgaccctgtggggctgctcccttcagctgagagcctcgaacagagatttacccacatatttattaatagcaaacgagtcattagcattgtttctgtagatattagattaactaaaagtatcccttataggaaacaaagggatgggctgaaataaggggatgggtttggctagttgtctgcagcagtagcatgtccttaaggcacagatcactcatgctatcatttgtggtttaagaatgcctttaagtggttttctgccctggatggcccaggtgttccttgccctcattccagtaaacccacaaccttccagcatgggcatcatggccattttgaacatgtcacagtgctgcaaagattttgcttatggccagtttatggccagattttgggggggggcctgttcccaacatgtcccctttctttgatttgcaaagcgataaaagcaagggcagctttgtcacggtgagctacttctcacaggagtcaggatccacatctgcggactatacaatgacaaacaacacagattaaaagtacaatcatcattgaaatcacagagtttccaagtgtttttatccattttaatgggttactagctgctaatctgtctgcagctcctttaagcactccagttcttggcagtaaggtcaggtgtgcctgggatgctttaaatatttgttcttttatccaaaaacaagtttgtagagtgtctttctagatgcttttttattctttcccaaattttgatcttattaagccacaaatccttatgtttagctcctacaatgggccatatcttttgaggttgaggtgccactataccaccattgttccagataataggaactcttgccatactttttatcatttctaccatctgaccattttgttcagaccatatgaacatagtgtggccatggcacgcagactgagaagtgcaattcaagccaaacatccccttaggggaccaatgattccataggaatcattgtgcagcacctctgcctgttctgcaatgcaatcttcctaaacaagtacattcatattttctggccaggtcaattttgttacaaataggtttttgagggcagtatgcctcaatgtagcagcagatttattatggtaaatactgagatcagaaagcatgtgtaactgtgccatagagtgattacatccaggcatcatttccagctaagattgataaatatgcctaataagtataattgttctctgtgtcagcctttgttgaaggaatactcatggcagtggtgatcattgctatcatagctgccattaaattactcatggtgactggttgtcccactttcctcaggttttctttcaccatctgtgacagcttcttgatctgtccccaagtgggtggctgtgttcaatgggtgttgctcatgacagttggggtccttctcagtgtcagtcttgacatggctgcaaccagggggtccttgggatcctcccagagtctcttccttggcatctggctcatgataaggtttcaggtgtcttgatggtatccaaatcggctattgcttttggcctggagaaacataagcataaccgctaccccaagttattattttacctatttcccaactttttgttatcagatctctccaccaaaccagttgttctgcttctgtctttgcagctggtttctgtagatgctgttcagctgctgataacatctggcctttggtcaggctcaaaaaatttaaagttaataatgctagattcaattgtgtaggggctgtcccataatccctatttcgcccccttttttgcttttgttatcagttgttcatctgtatgaaatcgtaactgagcattttcaattaactgtgtggaatgaaccacatatgaagaatcggaaatcacattaataggcatatcaaaagcagtcaatacctcaattacagctacaagctttgctttttatagggagtctggaaaactttacttttcaagccagaataagaagctttaccattactagacccatctgtaaaacaatgaaaacacttagcaggctgcaggttgtttaccacaggaattgtaaatgcaaaccgttcacagtcttgctaggctaaagggatagtaaagaaacagtcttttaaatctatgactattaaaggacaattttttggaattatagcaggagaaggcaatccttgctgtaatgctcccataggttgtataactgaattgatagctcttaagtcagttaacattctccatttacctgattttttcttagttatgaaaactggagaattccaaggggaaaatgttggagccatttcctaattgttcagtaactaatttctctaaagcttccagtttctctttacttagccaccattgttctatccaaattggcttatctgttaaccattttaaaggtataggttctggaggcttgacaatggccgccatcaaaaatgatatcctaatctttggtgagaactttgcttttctccttgaagtggctctttcaaaccttgcaaatttttttctagtcccataccagggacatactccatttcatgcatcatacattgactttgagggctatataattgttctggaattagaacttgtgctccccattgttgtaataaatctctcccacataaatttataggtacagaaattacaattggttgaatagtcccaacttgtccatcgggcccttcacaatgcaaaatataactactttgatatacttcaggggctttaccaactccaactatgttaaattgagcaggttgaattggccacacagatggccagtgctgtagagaaatgattgaaatgtccgctcctgtatctaccaaacctttaattttctttccctgaatagttatttatttcacaggtaggacgtttatcagtaattgatttacccaataaactgctttgccttgtatatttgtgcttccaaatccacctgtttgtttaatttcactttttcccattcccatatacggcacaatcaggagctgtgctatgcactctcctggctctgctttccagggaacagaagtagatataacaatttgaatttccccattgtaatctgaattaatgactcctgtatgtatttctacccctttttaaacttaaactagaccttcctaaaagtaatcctattgtccccgctggcaagtgtccacagactcctgttgggaccttttgcaggggttccccaggcagaaggctcacagcttttgtgcagcataaatctactgtggcattaccagctgtggcgggggacagacattgtacaggggtgagtacagcctgagctggaaatgccccagtttagaacggggcccaggatgggcccctcatggtgttgcccaaaattgggttccctcctctatcaaacttagaatgacactgattagcccaatattttccttttttacattttggaaatatttcaggctcagcagttttcttttttcccctatctggcggcctgactcgctgattatttctacattcttttttagtatgaatagcttgtttaaattctttgagtaatttaaaaggaaaggactcaaatgtagctataatattttcctgttgatctggagggtgtattctaacagggagctgccaagcctctaaatcaccctctcatctagcttgctgaattcctgcctgaatagaactaagagcagtcactcggggcgccgctcgaacagtcactggggcaactactttttgcccagtgtcctccagaaaagaaagatctggagggtctttttcttcaaaataataatgagggggtgcagaagggtaggaatgaacctctccctcctttgccgctttagctttagctggcaaataaacctgctctgtaacctcttctgttaattcgttatactctccttcctcctcatcatcagtgtgaaaaagttccaaggtggaacaaaccagaccccacacttgtcccatttttaccctgatgcttctgagctcccctttttactcaccacggggattgctttaagagtactcgggtgtcctccagcttagttccatgttttccaaccatcgctccggcaaccctttgacctgcattggagcccccatgatggatgccacttgccaggaccagctcggtcagggagaccctaacccagcggtggtagaggaattaaagacacacagaaatatagaggtgtaaagtgggaaatcaggggtctcccagccttcagagctgagagcatcgaacagagatttacccacgtatttatgagcagcaagccagtcattagcattctttctatggatattagattaactaaaagtatcccttacgggaaacgaagggatgggccaaaataaagggatgggtttggctagttatctgcagtgggagcatgtccttaaggcacagatcgctcgtgctattgtttgtggtttaaggatgcctctaagtggttttctgccctaggtggcctaggtgttccttgccctcattctggtaaacccacaaccttccagtgtgggcatcatggccatcatgaacacatcacagtgctgcagagattttgtgtatggccagttttggggccagcttatggccagattttggggggcctgttcccaacactgctattaaatttttttgttaagatggagtttagctctgtctcccaggctaaagtgtaatggtataatatcgctttactctaaactttgcctctgaggctcaagcgattcttgtgcctctgcctccagagtagctgagattacagatgtgcaccaccacaccaagctaatttttgcatttttagtaaagatggggttttgccctgttggccaagctggtctcaaactccttgacctcaggtgatctgcccgcctcggactcccaaagtgctgtgattacaggagtgagccgccacgtatggtctctcctactaaaagttaaagaacatcagtgtttaaacattaatgagttcattggagcaaacagtgattggtgaaatgaaaagcgcccaaccgtggtttgtggctcatgtgaggggcatgaaggaaaggttttataaagtgcttgagaaggcaaaccagattcaagaattggttacagttatgcagtcaccttacttgcatgttccaggtagaaatgtcctccttatataattagaggttaattgcaggtttatgataggccaagcctgaatttttttcatcctaagatagtaatttgtaagaaatgcattcaagttaggtttcagatattttacttatgagcacagggcactagagccacttcagtctaatttcctgctgtttatttatttattttgagatggagtctcactctgttgcccaggctggagtgcaatggcatgatcttggctcactgtaacatttgcctcccagattcaagtgattctcctgcctcagcctcttgagtagctgggattacaggtgcacaccaccacgctcagctaatttttgtatttttagtagagatgaggttgcaccatgttggccaggctggtctcaaactcctgacctggtgatccaccctcctcagcctcccaaagtactgggattacaggtgtgagccactgcacccagccatagttagcttttcatgtctgttatttttagtgggtgatttcaaataaataattctttcactttgctttgggaatgctactagggaaaagaaatagagaaaatttttcttccactgtgactatagaaagtgaatacatttccacaagcaaatgtgaaagattaattgatgaatttcatatatttgtcaaaacatcagatcctcttttttataggatctagaatttgtaacagtggatatctctattttgtactctgctctctgaatgtccaagtttaatgctaaattttatgagatgaatcttggcaccttctagaaatgtttatatatgattgtctattaaattatttagtatgaataataaggaagcacaaaaagggtcagaaaaaaaggtgggaggggaagggagggaaaaaacatggtaaaatcagatcctaggtgagagaatatttcacccagaactcagcctattcttaagagggtcataaaaagggcttgtatgttagcttagagtaagattgagtctaagttaggaggcctgaggaaggaaaaaaacttaagcaaagtttggttaacaatttattattcaattatttatgaggcaaaaaaaaaaaaagaatttagagagtctgtggctttgtgatatcaaaaacaggaagggtgttctgtgcagtaagatgaccttggaaaacacaaaagatgggggattactttaatcacagctgttacctacccaccccatttttccccttcactttttttgccctgtacatttcttccatttggctgttgctgacaacaacaatcgttgtctttttttttttttttggcagtgggagggggatggttacggagtgtttctttgtcacccaggctggtgttcagtggcttgatctcggctcactgcaactttcgcctcccggattcaagtgattctcctgcctcagtctcctgagtagctgggattacaggtgcacaccaccatgcctggctaatttttgtatttttagtagagatggggtttcaccatgttggtcaggctggtcttgaactcctgacctcgtgattcacccgcctcgccccccccaaagtgctgggattacaggtataagccactgtgcctggcctctgtttttaattatatttctctcacattgttcagaattactagacctgatattaacacataatgtgttcacaaggcttcactctgtatggacctttttctcttgggcttccagtcacaacccacagtcatgcagcaaagttcacactgccctcaaagtctgcaggctgaatgttcttcctgcctatttgggatctaacattcttttttgtttgttttttttttttttttgagacggcgtgttgctctgtcacccaggttggagtgcagtggcgtgatctcagcttactgcaagctttgcctcccgggttcatgccattctcctgcctcagcctcccaagtagctggcactacaggtgcacgccaccactcccggctaattttttttgtatttttagtagagacggggtttcatcgtgttagccaggatggtctcgatctcctgaccttgtgatccatctgcctcggctgggattacaggcgtgagccaccacgcccggccgggatctaacattcttaatagtgcagtttgaccagatttctacaaaaacaaacatggcattaatcagctattctcactgtgtcttttcattcccccagcatcttcagactttaaattgattcaaatagcatgtggcctgaaaacccagctaggttcacacatttgcattgagtaggcctgagaatctaaatatttcactcattctcttgcctgaatacccataaatgtgccaagtgtccctgtggcttcctttcctgcccctccaaacctaaatctgcagttccaaattttgtccagcttctagggttctccagtatgtgttagagcagccttcatgttggaatttctcctccagtttttctctccttactgtaatgcctagaatacagagccaagttaattgtacctagaatctacatataagggctgatatccacctggaattcacaagacagggccagacttaacattttgggcagtgagccactgtggttgtgtgaggggctcctggtgtaaggtaaatttggtggcagaatctataggtgtacagaagcaacttagcagaggcaaggcagggccacagctgtccagagagataaagataactacatctcctgtatgtgaattgtgttactggagaagggtattcttgtccttgaacccaacagttagctcaacatatataggtaatatcagatctggatcgagaattaggggttgttctattttttattctggctccacagagtcagcctgagtctcctctgtttgaataactgttgaagcatcagcccagggccactgcagaccctctcactagcacctaggagtccttgagacatttagggatgtactgtgcagacaagggtcaggctgacaagtccaatcttcctcccatctcataaaagaatgagtaatccagggcttctttctcccatcacagaaggtatctccttatttggtgtccaaataggagttgctcctatttcctgatatttgggtggagaacaagtaggaggtctggaggcccaaactgataggttaacaaattgtttccattttatttggccatgagaagaacaggtgaagcagtcatggaccctaccatcaaggaatttttattctagagccaatggataaattatttaatttagagtaatgcgatcagaacagagaagggagttgtatagagaacttgggcttcatttgggacactaattgtatgttgtggttgtgagttctgatgtcaccacctgaagggccacccatggacagaaaagttgtggcaattattatttctatttcttttcacttgacaagaataaatagttttctatgtaattttctttattattattatttttttttttatttgagatgaagtctcactctgttgcccaggctggagtgcagtggtatgatctcaaccacctgctacctctgcctcctgggttcaagcaattctcctgcctcaacctcctaagtagctgggactacaggtgcccacctccatgcccagctaatttttgcatttttattagagacagggtttcactgtattggccaggctggtctcgaactcctgacctcgtgattcacctgccttggcctcctaaagtgctgggattacaggcatgagccaccatgcccagcttcaatgtaattttttagaaagacctacatgatttggtaaaattggttgctattgtatcatgcaaaatagataggatgaggcttaaatcgtttaaatcagaaaagttctgggagtcaagttcttattggtcaggcttagaatggagaactgaaaataagccagcagcatagagatgagaagctgagggccagctccctgccccagccctacccagctctaccctcttctgagccttgtccaggtctggcctcaccctgatatctccctcacagaactgattagaggagatcggatttatgtgtggcaactcttggtatctcttcagagctggatctcacgattttcctagacccaaaaacgaataaatgggagcaaaggattatttatttggagccttaatttctttctttcttattgaaaccagtgcttctagagacatttcatacagcaacctgttttacacttctgcaaatccaatagtttttctacatgttatgagaaagaaaatataaacacaacaattaaaagtcttttggacctctacttaagccttcatttctgtatcccttttatcttctgtatttaggtttcatagtgataagaaaacaaacagggctgggtgccgtggttcacgcctgtaatgtcaaaactttgggaggccgaggtgggcggatcacctgaggtcaggagttcaagaccatcctggctaacatggagaaacccagtctctgtttaaaatacaaaattagccaggcatggtggcacatccctgtaatcccagctactcgggaggctgaaggaggagaatcacttgaacctgggaggaggaggtcgcagtgagctgagattgcaccattgcaccaacaagagtgaaactccatctcaaaaaaaagaaaacaaacagcctgaaccatcgtctaaatcctgctagaaattatgggacacttaatacctacttcacagaattttttgaggtttaactcacaccaggtgagtttcccagcacaacacaccacagcatacttgtgagcacatagtatgagctcaataaacattgcattaacacatgtgtacatgtttcaaaatgcattctccagccttctgtagacttcaaatagctggcaaaaaatgtgatcttttgggatggtgattagtggttttcactgtaaacaaaaaatattcatgtttcaataagaatattgtatgtaagggactttgtgtgttattcctgctttctctgagagctggagagcaatatcagcattaacagggaattttttttttttttgagacggaatctcgctctgtcgcccaggttggagtgcagtggcatgattttggctcactgcaaactccacctcccaggttcaagcaattctcctgtctcagccttccgagtagctgggactaaaggtacctgccaccatgcccagctaatttttgtatttttagtagagacggaggttcaccttgttggtcaggctggtctcaaactcctgacctcagatgatccacctgcctcggcctcccaaagagctgggaatataggcgtaagccaccacatgcggcctatggggaactttttttaaacaagccaattcctggaccccttcaaaacgtgcaggatcacattagttagagaagggcccagaataccaaatgacctatatgcacattgaagcttgagagggaatggtcagctaagtggttctcagcccaggcatccagttaagaccacatgaccagtttgaagaaataccatcacctgcgtcttcccttacaggttgtattttctcctgagtagattcagatgattatgtacttttctctccatcaatatcacagcagtaataaagggcccacctaagtgccttcttagtgcaatagacagcgtatcagtctcataatgggcccatctgtgcattggcccctaaatctggtttgtctcattacagctgatgctaaatttattcatctggctaaggtgttttctgccaaattccttcactataaagttagttatttttttctttatcaataatgagtatcttggaagggggatttactgaggtgtataaattatcaaatttaatttaaaaactcctatttcttttttttcttatatcttactttggagaataaatactttcctatttgtcaactatagatagcagcttttgaaactggaagttctgaaacaggtctcagttgtttaggtttccatttaatttcaccttcatttcacaagcatatactttattctctgtaattttagggacaaagaaaaaatatataatcaatatatctattgtcttaaaattctaaaacatactatggcacataaaataaacaaagcaaaacattaaaaaaaaatctgactcagtggatcacctgaggtcaggagtccgagaccagcctggccaatatggtgaaacctcgtctctactaataatacaaaaattagccctgcatggtggcgcacacctgtaatcccagctactcaggaggctgaggcaggagaattgcttgaacccaggaggcagaggttgcagtgaaccaagatcgtgccattgcactccagcctgggggacaagagtgaaactccatctccaaaaaataaaaaataaaaataaaaataaaataaaaaatatacaactaataatagctcttattttactttatattattgcatgttttgatcttcaattacaagcacaaaacacaaaaatagatctacaaagaatgttataattgttaaacaatttaaaacatttaattttatttatacagaactgttctactctctcacttttcatgtgtatatagtcaccatttctatgatgtgtgcataaaatgtaaacatcatttgatcaattttgtgttgctgcctttttttttttttttgagatggtgtctcgctctgtcatctaggctggagtgcaatggcgtgatctcagctcactgcaacctccgtctcctgagttcaagctattctcctgtctcagcctcccgagcagctgggactacaggcacccaccaccatgcccaactaattttttgtgtttttagtagcgatggggtttcaccgtgttagccaggatggtctcaatctcctgacctcgtgatttgcctgccgtggcctcccaaagtgttgggattacaggcatgagccactgcacctggcctgctgctttattgtttttattaatcttctcaattataaaaactgctctggccagtcgtggtggcttgcacctgtaatcccagcacttcgagaggctgaggtgggtggatcatttgaggtcaggagtttgagaccagactggccaacatggtgaaaccccatctctactaaaaatacaaaaattagctgggcatggtggcacacgcctgcagtcccagctactctactcaggaggctgaggcaggagaatggtgtgaacccaggaggcagagattgcagtgagcccagattgcatcactgcactccagcctgggggacagagcgagactccgtctcaaaaaaataaaataaaataaattaaaaaaattaaataaaaagtaactggtctgggccaggcacagcgcctcacgcctgtaatcctagcactttgggaggctgagatgggtagactgcctgaactcaggagttcgagaccagcctgggcaacatggtgaaaccttgtctctactaaaatacaaaaaaaccccaaaagcctggtgtgatgtcgggtgcctgtgatcccagctacttgggaggctgaggcaggagaattgctggaacccaggaggcagaggttgcagtgagccaagatcatgtcactgcactccagcctaggcaacactgtgagactctgcctcaaaaaaaaaagaaaagaaaagaaaagaaaagaaacaaacaaacaaacaaacaaaaaactgcttttcttgtatccaagaagttttgggtccttgtgtgttgaatttgatttatatcagggtgctttttttttttttgagatggggtctcgctctatcacccaggctgcagtgcagtggtgcaatttcgactcactgtaacctctgcctctcaggttgaagcgattctcttgcctcagcctcccaagtagctaggactacaggcgcatgccaccatgcccggctgattttttgtatttttactagagacagggtctcactgtgttagccaggatggtctcgatctcctgatctcgtgatccacccacctcagcctcttgaagtgctggattacaggcgtgagccattgtgcctggcccagggtgctttcttattttccctctaatttcttctttgactgtcatttgttgtttaggagcatgttgtttagtagccacatgttttgagttttctaattctcttcttgctatttttttctagttttatgccattgtgatcagaataaaaacaacataattttcaccttcttaaatttgaaaaagcctgtttatttctggtttaatgtataatttctcctgaaagatattttatgtattttttatttttattttcattttgttatttttttctttgctctgtcttgccctgttgcccaggctggagtgcatgggtgcagtcttgactcactgtgacctcctgaaattataatttctcaaagtataattactcctgaaaaatattttatgtaattttttgtttttatttttattttgttatttttgttgttgttgttctctcttgctctgtcgcccaggctggagtgcatgggtgcagtcttgactcactgtgacctcctgaaattataatttctcaaagtataattactcctgaaaaatattttatgtaattttttgtttttatttttactttgttatttttgttgttgttgttctctcttgctctgtcgcccaggctggagtgcatgggtgcattcttgactcactatgacctccatctccccagatcaagcagtttttctgcctcatcctcccacgtagctgaaactactggtgcgcaccaccaagcccacccaatgtctgtattttccatgatgatgaggtttcaccatgttggccaggctgggagaatatttcatgtatttttgagatgaatgtgtattctcatactgttgaatgaaatgttatgtgcatatcatctatttagtctatagtggtatacaactacactgttttcttagtagatttctgtttgaatgatctgtctgttgttttgagtaaggtattaaagttttattgtatttctgtctacttctccctacagttttgtgaatatttgctttatatatttagaagctccagtgctgggagcatacatatttttaattactatatcctcttgacaaattaacttctttattattgcatggtaaactcatttgactcttgtgatagatgttgctaggaagtcttttttgtctaatttagcaataactaccattgcacacttttgattatcattttcatggaatatcttttttcatcctttcacttttggcctatgcttgtccttaaatcaaaagggagtctcttttaggcagcatatcaatgggcttttaaaaagtgagttggtcactctttttcattgtgttgtttgttgctatatcagtgtatcacagactaagtattttatgaaaagcaaaaatttatttgcctcatgattctggaggctgagatggcaaagaatatgacactggcatctgttgaaggccttgttctgcataataacatagccaaaggcatgaggaagagacagcttccttttataagagaacctcttgatataattaacccatctcatgataagaacatttatccatttatgagggttagattgcttatggcctaatcaattcttaaaggtcccaccttttaattctattacaatggctatttaattttaacctaaaatgtggagatgacattgtgtatagtagcagtgtctgtttattggataatttattttctttatatgtaaaatagtgataggttactattaataagttactattgtgattttgttttttctgtttatttaaattttaaaaaatattttattcttgtcctgtctttcctatggttttgttagtttgtgtcaagacagggttatgctttgttgcccaagctagaacacagtggtatatcagtgtgagtcacagccctctgtagcctcaacttcctgggctcaagcagtcctcccatctcagccacctaggtggctgagactacaggcatgctccacaacagccagctatttttttcatagagaaatgtctcattatgttgctcaggctggtatcaaactcctgagctcaagtaattctcccatctcagtctctcaaagtgctgggattttaatagtctagtttaggatgataacaatttaacttctgtgtatgtaaaaactgtacacattttcttcttttacacacttaatactatatagtcatactttataactttttatgttgtgtattcattaaaaaattattgtcactgtatttttaatactttttgtatagatcttattttagagtttaaagtatttttacaaaaccattacaatattctgaatttcactatatacttatcatttccagtgacatttatactttaatgtttttcatattgttagttctgattccatcattttaatgtgaagaattccctgtatcatttcttgtaagacaggttgagtggtgataaatttcctcacctttttcctttgtcttgaaatgtcttgatctgttttatggctaaaggacagctttattggatatagtcttttcagttgtcaggtttttcttttcttctttcagcattttaaatatataattgaatcttctggtttgcaatatttttgctgaaaaatccactgattacataaagtttctcttgtatgtaaagaatctcttatctcttcctgttttcaagatttgtgctttatctgtgaatgttgacaatttaatgatattgtgttctagggtaatatttactaggtttatattttttttctgtggataaattgagcttcataaaactggatgttcatatccttctctaaatttagaaagattttctttgagacaggggctcactctgtcccccaagctgaagtgcagtggcatgatctcagctcactgcaacctctgcttttcaggctcaagtgatcttcccacatctgccacccaagtagctgaaactaaaggcatgtgccaccctgcctggctaatttttgtatttttttgtagagatgggattttgtcatattgcccaggctggtctcaaacacttaagctcaagccatgcacccaccttggcctctcagagtgctgggattacagatgtgagccacaaggctcagcctagatttggaaagttttcagacattatgtctttcaatctcctttattctttttctctgtcttcttctgaaaattctaaaatgtgtcaatttgttcactttatgattgattactttcaaatgacaagtttttgagtttgttgaattttcttttttataattgagtctcctgttaaaattttctactacacttcttcagttctgccattgtttaccttaactgcaggatttttgtgtggtcatttttatggtttttatttctctctctctctctctctctctctctctctctctctatatatatatatatatatatatatatatatgtataaaaaacatgagatgtcattttgctgtgttggccaggttggtcttgaactcctggtcccaagtaatgctcctgcctcagcatcccaaagttttattattataggtgtgggccaccatgcttggcctacttatgtattgtttctaattttgtttctgtgttgtttcctaaaaattttttagttatctgtgttctttgcatcttattgaaatttttaaagaaaattgttttcttttttaaaactttttgagatgaactctcactctgtcaccccagctggagtgcagaggcatgaccttgggtcactgcaacctctgcctcccaggttcatgtgattttcctgcctcagccacccgagtagctgggaatacaggtgcctgccaccacacctggctaatttttgtatttttagtaaagatggggtttcaacatattggtcaggctagtctagaactcatgatgtcatgtgatccacccaccttggcctccacaagtgctgggattacaggcatgagtcactgtgcccagccaggaagacttatttgagggaataataataataaaacaacaacaacaacaacaaaacttccatagctttgctagagatttacacattcagatacaaaaagctcaaagagcccccaggaaattcattacaaaaagataattacctaggctgtagtcatcaggttatctaatgtcaagatgaagaaaataatcttaagagctgtgaggtgaaagcatcaggttacctataaataaaaacctaccagattaacagcagacttttcagcagaaatattacaagtgagaagggattggcattctatctttagcctccttaaacaaaataattatcagccaagaattttgaatccagtgagataaaggaatataaatgaagaagagataaactctctttcacagaaacagatgctgagagaatttgccactgccaactcagcactacaagaaatgctgaaaggatatctaaatcttgaaacaaaacctcaaaatatacacgagtagactctccttaattcataaatcttacaggacctataaaacagtaacacaaagaaaaatatcaagatattcaggcaacagctggcatgatgaatccagcagtacctcacttctcactactaatgttgaatgtaactggcaaaagtgcttcgctttaaaaatacagaatagcagaataaataggaatccctacaacaagtagctgctgtctacaagagactcaatgtaagcatacaccaagaaactagagaaagaacaaatcaaactcaaacccggcagaagaaaagaaataacaaaaatctgaataaaatcagagaaaaactgaataaaattgaaacaaaaccacaaaagataaaacaagaatctggttctttgaaaagataaacaaaactgatatgccattagtgagattaactaaaagaagcagagagagaagctccaaataagctcaattagaaacaaaacgggagatattacaaccaataccacagaaatacaaaagattattcaaggctactaagaacacctttatgtgcacaaactagaaaacctagaaacaataattcttggaaaaaatataacccacctagattaaactacaaagaaataggcactctgaacagaccgataacaagtagtaggattgaaacagcaatttaaaaaattgtcattaacaaaaaagtccaggaccagatgaatttacaggtgaattctatcagacattcaaagatgaattggtaccaatcctactgaaactactccaaaaagtatagaaagtggaaatccttcctaaattattatatgaagccaatatcacctgaatatgaaaaccaggataggacataacacaaaaagaaagctgcactccaatgttcctgatgaaaatgaatttaaaaaattgtcaacaaaatactagctagccaaacacaacagcatatcaataagataatacaccatggtcaagtgcattttataccagggatgcagggataaatgtaatagaccacaaataaaattcaaaacaaaaattatacaatcatctcaatagatgcaaaaaaagcatttgataaaatccggtacctttttaagattaagaccctcagcaatatcagcatagaagggacataccttaacataatgaaagccatctatgacaaacccaaagaaaacattacactgaatggggaaaaattggaagcattccctctgtgaactgaaataagacaaggataggccgggcacggtggctcacgcctgtaatcccagcactttgggaggccaaggcgggtggatcatgaggtcaggagatcgagaccatcctggctaacaaggtgaaaccccgtctctactaaaaatacaaaaaattagccgggcgcggtggcgggcgcctgtagtcccagctactcgggaggctgaggcaggagaatggcgtgaacccgggaagcggagcttgcagtgagccgagattgcgccactgcagtccgcagtccggcctgggcaacagagcgagactccgtctcaaaaaaaaaaaaaaaaaaaaaaaaaaaaagacaaggatgcccactctcactctcaccacttctattcaacataatactggaggtcctagccagagcaatcagacaaaagaaagaaatagatggcatttaaattagtaaagaagtcaaactgtcactgtttactgatgcgtatgattgtatacctagaaagccctaaagactcatccaaataacttctagatctgttaaataagtccagtaaagtttcaggatacaaaataaatgtacacaaatcaatagcactgcaaaacataaacagctactaagctgaaaatccagtaaagaaccgaaaccctattacaacagctgcaaaaaatataaaataattagggccgagtgcggtggctcacgtttgtaatcccagcactttgtgaggctgaggattgcttgagctcagaagtttgagaccagcctggacaacatggcaaaaccccctctatacaaaaattagccaggcgtggtggtgcattcctataatccaagctacttgggaggctgaggcactagaattgcttgaacctgggaggtggagtttgcagtaagctgagatcacgccactgcactccagcctgggtgaaagagtaagactctgtctctaaataaataaataaataaaattaggaatatacttaaccaatgaggtaaaatgtccctacaaggcaaaccacaaaacactgctgaaaaaaatcatacataacacaaaaacacaccccatgctcatggatgggtagagtcaatattgtaaaaataaccatactgccaaaatctgtatacaaatttcatgcaatttccatcaaaatgtcatcattattattcacagaactagaaaaaacaatcctaaaattcatatggaaccaaaaaaaaaagcccacatagacaaaacaacactaagtaaaaagaacaatctgaaggcatcatgttacttgatgtcaaatcatatgacaaggctatagttaccaaaacagcatggtactggtagaaaaacaggcaggtagaccaatggaacagaatagtgaacccagaaatagagccaaatacttacagccaacttttttgacaaagtaaataagaacataaagtgggagaaaggacactctattcaacaaatgttgctgggataattggcaagccatatgtagaagaataaaactggaaactcatctctcaccttataaaaattcaacttaagatggatcaatcacttaaatgtaaggtctgaaactataaaaattgtagaagataccatcagaaaaatgattctagacatcggcttaggcaaaggttcatgaccaagaacctaacagcaaatgcaacaaaaacaaagataaatcaatgggccttaaactaaaatgcacaagtgggagaaaacttttataaactattcatctgacaaaggaataatatccagaatctacaaggagctcaaacagtcagcaataaaactaataattccatcaaaaagttggctaagaacatgaatagtcaattctaagaagatatacagatggccaacaaacatgaaaaaatcctcaatatccctaattatcagggaaatacaagttaaaacaataaagtgataccaccttctgcaagaatgaccataattaaaatatcaaaaaaatattacatgttcacattgatgtggtgaaaagggagcacttctacactgctggtgggaatgtaaactattaggctcgtgcaaaagtaatcacagttttgccattaaaagtaatgaaggccgagcgaggtggctcaggtctgtattcccagcactttgggaggccaaggagggtggatcacgaggtcaggagttccagaccatcctggctaacactgtgaaaccccgcctctactaaaaatacaaaaaattagccaggtgtggtggcacgtgcctatagtcccagctactagggaggctgaggcaggagaattgcttgaacccaggaggcagaggttgcagtgagccaaggtcacgctgctgcactccagcctcactccagagtgagactctgtctcaaaaaaaaaaaaaaagtttatttctgttttaatagtcagtaatcacttgctacatgtgtttcctgtatgtgatactgcagtctctctgctgctataacatttacatttggtctcagcagactcaaactgtcattccaaagtatcccatcatttctttcaccactttatgtaatgcagggaagaaactagggtctggaaaggccccttgaagccagaaataaatatgtacgtgccagtatttttcccatcttttaaaaaagaaaccaggactctccctctccctctccctctccccacggtctccctctccctctctttccacggtctccctctgatgccgagccgaagctggactgtactgccgccatctcagctcactgcaacctccctgcctgattctcctgcctcagcctgccgagtgcctgcgattgcaggcacgcgccgccacgcctgactggttttcatatttttttggtggaaacggggtttcactgtgttggctgggctggtctccagctcctaactgcaagtgatccgccagcctcggcctcccgaggtgccgggattgcagacagagtctcgttaactcagtgctcaatggtgcccaggctggagtgcagtggcatgatctcggctcactacaacctccacctcccagcctcctgccttggcttcccaaagtgccgagattgcagcctctgcctggccgccaccccatctgggaagtgaggatcctctctgcccagccacccatcgtctgggatgtgaggagcccctctgcctggctgcccagtctggaaagtgaggagcatctctgcccggctgccatcccatctaggaagtgaggagcgtctctgcctggccgcccatcgtctgagatgtggggagcacctctgccccgccgccccgtctgggatgtgaggagcgcctctgcccggccgcgaccccatctgggagatgaggagcgtctctgcccggcccccccgtctgagaagtgaggagaccctccgcccggcagctgccccgtctgagaagtgaggagcccctccgcccggcagccaccctgtctgggaagtgaggatcgtctccgcccggcagccaccccgtccgggagggaggtgggggtcagcccccacccagccagccgccccgtccgggagggaggtggggggtcagcctccccgcccggccagccgccccatctgggagggaggtgggggggtcagctcccccgcccggccagccgccccgtccgggaggtggggggcacctctgcccggccgcccctactgggaagtgaggagccccctctgcccggccaccaccccgtctgggaggtgtacccaacagctcattgagaacgggccatgatgacaatggcggttttgtggaatagaaaagggggaaacgtggggaaaagattgagaaatcggatggttgctgtgtctgtgtagaaagaagtagacatgggagacttttcattttgttctgtactaagaaaaattcttctgccttgggatcctgttgatctatgaccttacccccaatcctgtgctctctgaaacatgtgctgtgtccactcagggttaaatggaaaaaaaaaaaaaaaaaagaaaccaggagttggcaattacttttttttttttaaagacagagtcttgctctgtcacccaggctgaagtgcagtggtgagatcttggctcactgcaacctccacctcccaagttcaagtgattctcatgcctcagccttcagagtaactgggattacaggtgtatgccaccatacctggcaaatttttaaatttttagtagagatgagcttttgctattttgtctaggttggtttcaaaattctgaccttgggtgatccacctttctctgcctcccaaagggcttggattacaggtgttagccatcatgaccagccagcaatttactgctaaaaaagctttgttatcttagggatcaggaaaagctgtgttgcgtaactgtaacacaatctttctatgtggctctttacattgtttttacctgggcattgcacacagttaacccatttataaattttctgcaagtgtattttggtcagtatgtttttgttacatgtatatgtctataaaagaattagggcctgtggtattttgctgtgccatcttgcttatgtagtttgtacaattttataggttagattagtgaagtatatttatctgagtctagcaactggagtaatttgttatttttatttctttcagttacgtgttctcattttgctcaagacctgtggccagagcagggcatgaaagattccttccaaaacttgataccgagaacatatgcaaagtgtggagatgagaatttacaactaagaaaaaactgcaaaagtgtggatgatggtaggatgcacaaaggaggttataatggatgcaatcaatgtttgacatcgacccagagcaaaatatttcgtggtgataaatatgtgaaagtcttttataaatatccaaattcaaataataataaaataagatatactgaaaaaattctttcaaatgtaaataatgtggcaaatcattttgcatgctttcacacctaactcaacataagaaaattcatactagagagaattcctacacatgtgaagaatgtagcaaagtctttaaatgttcatgaccctcactcaacataaaagaattcacactaaaaagacactgttcaaatgtgaagaatgtggcaaagcttttaaacagtcctcaaatcttactgaacataagagaattcctactagagagaaacactacaaatgtgaagaatttggcaaagattttaagtggtcttcaaatcttcctgaaaatgagataattcatattggagaaaaaccttgtaaatgtgaagaatgtggcaaaacttttaagtggtcttcaaacattactggacataagataattcatactggagagaaactatacaaatgtgaagaatgtggcaaagccttttactcctcctcaaaccttactttacataaaatgattcatactgcagagaaaacctacaaatgtaaagaatgtggcaaatcttttagccagtactcacaccttactacccataagggaattcatactggaaagaaaacctacaaatgtaaagaatgtggcagagcttataagtggtcctcaaaccttactgaacataagataactcagaactggagagaaaccctacaaatgtgaagaatgtagcaaagcctttaactggtccttacaccttgctgtacataagataattcatactgaagagaaaccctacaaatgtgaagaatgtggcaaagcctttaaatggtcctcaaaccttactaagcataagataatttatactggagagaaactctagaatttgaagaatgtggcaatgcttttaagtggtcctcaaaacttactgaacagctttcgggtgatgacaaccttcccacaagaggacatgcctctcacaaaggatctccttcatccctctccagaagagaagaggaaacacaagaagaaacgcctggtgcagagccccaattcctacttcatggatgtgaaatgcccaggatgctataaagtcaccacggtctttagtcatgcacaaatggtagttttgtgtgttggctgctccactgtcctctgccagcctacaggaggaaaagcaaggcttacagaaggatgttccttcaggaggaagcagcactaaaagcactctgaatcaagatgagtgggaaaccatctcaataaacacattttggattaaaaaaaacttactgaacgtaagataattcatacttgagaaaacctacaaatgtgaagaatgtagcaaagcttttactcatctctcaatccatgctaaacataaaataatttatgctggagagaaaacttacaaatgtaaagaatgtggcaaagcctgtaaccattcctcacatcttactacacgtaagtcatactgaagagaaattacaaatgtgaagaatgtggcaaagcctttaataagtccccagatcatacttgagaaaaacttcacaaacctgaaagatgtgacaatgcttttgacaacacctcaaacctttctaaacataaaagaaatcatactggtgagaaagtctaaaaatgtgaggaatatgacaaagtctttaaatggtagtcatgcttaattgtaggtaagataattcatactggagaaaacttctacaagtgtgaagaatgtggcaaaacctttaaccaatgctcacaccttattgcacaggaaaccatttatatttgagaaaaattgtataaatttaaagactatagaaaagccattgatatctgctcacatcttactcaacatcagagagttcatacttaataaaagcattataaatgcaattactcttaaaaggtctttcagaaaatataagcctataatgtgaaaaagtatttattctgaggacaaaccttacaaatataaaaaggattgtagtgtagcaggatgagccacagacaaaactcctcagacactgcgttaaagaaggaaggggtttattctgcagggggtattggcaagactcctgtctcaagagccgagctccctgagtgagcaattcctgtcccttttaagggctcacaactctaagggtgtgcacgtgagagggtcatgattgagcaagcagggggtagatgactgggggctgcatgcatcggtaattagatcggaacaaaacaggatagggattttcacagtgcttttctatacaatgtctgtaatctatagataacataactgattaggtcaggggtcaatctttaactaccaggcccagggtgtggcaccgagctgtctgctcgtggatttcatttctgccttttagtttttactttgtctttctttggaggcagaaagtgggcttaaaacaatatgaggggtggtctcctcccttagtagtacctttacttgtatcacagatcttattgtatatatttcatactagaggaaaaccctaaagaagttgctcaaactttgttcaatatcaggaaatttatactggagaaaaaccctgcaaatgtaatgaatttgaaagaaacacatttcaaaaactacagcttagaaaacatcatagagtttatactaagatatatttttgtaaatgaagtaaatataaaaaatacttcaaaactaactttatgtaaatcacagagaatacacagtagaaataaggcacttactcttcagacattacattaaatcagagagttgagtatagaaaataatcccaaactaaaattatttgataagttattagtatataactttaaaagaagtagaagattttttgtagggttataattacattcaaagtatacttttttattattacagatttttttgaaaagcaaataatgatgtaatttaactctcaaattacttcatgctctccattcctattgtatttacatgtgaaagcatgtgatcaaatattactgcattacagatataagagattcttttttattacgtaggcattatttatgaccttttccatggaagagtaagaacattaaaatataaaacacataatgaaaatttaagtagagaggctcattatggttaacttataatgttaagtgatgtatgaggtaggtgttctgagtaatatttttgtccactatagtgaaaaaaactttttaagttttagttaaaattaattaaattagcagtaacttattaattgtacttttatgtaatatgcagtacatttaaaaatttttcagttatatgtgaatttaattttctagtaaaacattgtttaaaatgtaacatctattgtacattcaatgaagtgttttttttttttttttttgagatggcgtcccactctgtcacccaggctggagtgtggtggcatgatcttggcacactgtaacctccgcctcccaggttcaagcaattctcctgcctcagcctcccaagtagctgggattacaggcacttgccaccatgcccagctaatttttgtatttttagtagagatggggactcaccatgttggccaggctggtctcaaactcctcacctcaagtgatccacataaatggcatattttggtacaggcatataatatgtaataacgacattagagtacatgaggtatccatcaccactagtatttgttctttgtattacaaacaatccaattctacacctttagctatttttaaatgtacaattgttattgagtacaggataaattttatggtcataattaaaattatataaataaaattcatacatatctgagtcctaaaaaaaactttcaaaaatttgttttttatatatatatatttttcaacatgtggcaactctgcctgcaaacacatacatacagaattttagttttgatttcaatcaggttaaatatacacatatattattttaaagataacactaggtatatgcaaattatgatgaatgtgtgtgtaagtatgagtcagggcatattttcagaagaaaacaataaatttttttttttttttgagacagaatatcgctctgtcgcccaggctggagtgcagtggagcgatctctgctcactgcaagctcctcctcctgggttcacgccattctcctgcctcagcctcccaagtagctgggactacaggcacccgccaccacgcctggctaattttttgtatttttagtagatatggggtttcaccatgttagccaggatggtctcgatctcctaacctcgtgatccacctgcctcggcctcccaaagtgttgggattacaggtgtgagccaccatgcccagccataaatttttttattaaggcgactaatttagtagaaaactaaaaacctaaaaaatgtggaaagcaattctatactgtctgctttgtattgaattctttaaaattgtatggcttatggttcagagtctccccatgcaatttgcctggttttacttgcttggtactctttgctagacccataattttcttgtttcttattttttttgttttgtagtttatgcagtattcattatgtgagctggtcagggattataatgatttttatgaaatttaatagtgcacacaaaataatttgtagatgtaattttacaattagtgtatgaagttatgttttatttaattagaagattccattctgttcttttacttggagaatactatataagcccacttttatttagttactgttcctttcagattttaaaattgtcataagttaatttatttatttattgagcaaatttgttcaggtaagtactagggtggcttccataagtcaagaggatgtttttgtatataaatgcagcaaatgaacatggcagtgcttgctgtgtagcagatgcttcatgataagccataagtattcctcctggagttagtttgtaacttcaagtcagagagagaaaatatcaatggtgaagaaataacgttgatttgtcatgtgaagaggattttttttttttttttttttggctgcacagctgactcttgctgaatttaaagagaaaatctgctttttttatttttatttttgagatagagtttcgctcttgttacccaggctggagcacaaggcatgatctcggctcactgcaacctctgtctctcgggttcaagcgattctcttgcctcagcctcccgagtagctgggattacaggtatgtgccaccatgcctggctaattttgtatttttagtagagatgggatttctccatgttggtcaggctggtctcgaactcccgacctcaggtgatccacctgccttggcctcccaaagtgctgggattacaggtgtgagccactgcgcctggccaattctacttcttatattaccaaattatctcatgtttgtttgtctcattatcggcattccaactatgtatgcatcacagacctttttttttctgtgttacagctacagtatcctcactgttgtcttcatgccatgtcatttcacactgtactttgtaggttttgataaggaagttggtattttagtaatgcactgaaaaattagttttaactgaagaattagcttatcaatataactttcatatcagttaattaagaggcggctgggcacggtggctcatgcctgtaatcccagcactttgggaggctgaagtgggtggatcatgaggtcagaattcaaggccagcctggccaagatgctgaaaccctgtctctactaaaatacaaaaattagcccggcatggtggcaggtgcctgtaatcccagctactcgggaggctgtggcaggagaatcgcttgaaccccagggggcagaggttgcagtgagccgagatcgcgccactgcattccagtctgggcaacagagtgagactctgtctcaaaacaaaacaaaacaaaacaagcaaacaaacaaaaaatgcattcactgtccacaggtgagagaaataaatcagttagcactgtttttctttgtaacagaaaaatctcattagattcttacacaaagtgtaaatataaaatttgttagaaaatatatcttacaaattaagtttttaagacttattcacaagtaaaaaagttttaatttaattttttatgatatagcacaacttatgttctcatgcagaatcttttgtctttaagtgataatgttaaattttgcaaaataataaaatgaaccctgtggatttgaaattcaaaataatatttctgtttcatattgatattacaattttgaggagtttctcttattgtatataagatttttagtggatgaagttcagtctacagtttttattcttcgtcacctaactgtagccaacaccttgctcatttttttttttttctggaaaaaattttaaagatcatagcagctttttgattaaaacattttccgttattttgcacgcaaacttgtttactgtattcacagagtgccctgttatgggaccataagcaacacctgctttcttagtgtcttttatacctttattatcagcaccaaaaacttcatgtgccctcaagcttaaaataaaagccctaatgtacattggcttctcccatgcactgtgctgggttcagaacatgctgataaatatcagagtttctgtgattgtgactgagaaattaaatggcaggagcagcacagaaaccatatgtttttgatactatttagccaaatcaatgacaaagagacagtattttacacactggtattcttctgtaatatttttaaaatatctttttaacttgacagataagcatatttattctgtaaaacatgatgttttaaagtatatatacattgttaaatgcttaattttaggtaattaatgcttcacctcacatagttaaaatttttatggtgagaccacattgacattgtcttagcattttaaaaaaatataataaattattatttttttcttattttatgttccagagtagatgtgcaagtttgttacataggtgaatgtgttacataggtaaatgtgtgccatggtggttagctgcacctatcaacccatcacctaagtattaagcccggtgtgcattagctgtttttcctgatgctcttcctaccctgccctctcctgacaggcctcagtgtgtgttgcttctctcctggtgtccatgtgttcttattgtttagcttgcacttacaagtgagaacaggacgtgttttgccttctgttcttgtgatagtttgctgaggataatggcttcgagcttcattcatgtctctgtgaaggacataatctcactacttttcatggctgtatagtattacattgtttatatgtaccaagtattctttaactagtctatcattaatgggcatttgggttgatatcatgtttttgctattgtgaatagtgcagcaatgaacatacacatgcatgtatctttataatagaatgatttatattatttttagtatataccaaggaatggagttgctgggtcaaatggtgtttctggttttaaatctttcaggaattgccacactgtcttttctaataattgaactaatttacattcctaccaacagtatataagcattcctgtttctctgcaacatagccagcatctgttgtttcttgactttttaataaccaccattctgactgacatgaaatggtatctcattgtggttttgatttgcatttctctgatgattagtgatggtgagctttttctcacaggtttgttagctacatgtatgtcttcttttgaaaagtgtttgttcagccaggtgcagtggctcacgcctgtaatctcagcactttgggaggccgagggtggggggggggtcagaccatgaggtcaggagttcgagaccagcctgactaacgtggtgaaaccctgtatctactaaaaatacaaaacttagctaggcgtggtggcacatgcctgtagtcccagctattcaggaggctgaggcaggagaatcacttgaacccaggaggaggaggttgcagtgagccaagatcatgccactgcactccagcctgggtgacagcaagactccatctcaagaaagaataaagtgttcatgttctttgcccagttttttatagggttgtttgttttttttcttataaatttgtgtaagttccctctagattctggatattagacctttgtaagatagattgcaaaaattttctccttttctgtaggttgtctgtttggtctgatgatagtttctttttatgtgcagaagctctttagtttaattagatcctaattcatcaatttttgctttttgtgcaaatgcttctgatgattttatcataaaatatttccccatgcctatgtcctcaattgcattgcctagattcttttccagggttcttatagttttgggcttatatttaagtcttcaattcagcttgagttattttctatgagatataaggaagaggtccagtttcaattttctacatatggctagccagttctcccagcatgatttattaaatagaaaaaaattttttccattgcttgtttttgtcaagtttgttgaagatcagatggttgtagacacgcagttttatttctcatttctctattctgttctatgtggcctatgtgtctgtttttgaaatggtaccattcttgttttagttactgtagccttgtagtatactttgaagtcaggtaatgtaatgccttcagctctgttctttttgcctaagattgtcctggctatatgggctattttgtttgtttgtttgtttgtttgttttgagacagagtctcaccctgtcacccaggctggagtgcaatggtgctatctcagctcactgcaatctccgcctcctgggttcaagtgattctcctgccccagcctcctgagtagctgggaattcagatgcccacaactatgcccagctaatttttgtatttttagtagagatgagatatcatcatgttagactggtctcaaactcctgacctcaggtgatctgcctgcctcggcctcccaaagtgctgggattacaggtgtgagccatcacacccagtctatgggctcttttttggttccatacaaattttaatatagcttttcctaattctgtgaagaatgtcaatggtagtttaatgggaataccattgaatctataaattactttgaacagtatggccattttcacaatattgattcttcctatccatgtgcatagaatgttttttcatctgtttttgtcctctaatttccttgagcagtgttttgtagttctccttaaggaggtctttcactttccttgttagctgtattcctaggtactttattctttttgtggcaattgtgaatgggatttcattcacaatttggctctctgcttgtctgttggtgcacaggaatgcttgtaatttctgcacatttagtctgtatactgagactttgctgaagtagtcttatcagcttaagaagcttttgaactgagtaaatagggttttctaaatataggatcacatcatctgaaaacaaagacaatttgacttactctattccagtatgaaaattattttttatccttgcctgattgccctgaccagaacttccaataatatgttcaataagaatggtgagagagtgcattcttgccttgcactggtttccaaggggaaatgtttccagtttttacccagtcagtatgatattggctgcagggtttgtcataaatggcccttattattttgaggtatgttccttcaatacctagtttattaagagttttttatttgttgttgttgttttgagacagagtttcactcttgttgcccaggctggagtgcaatggtgctatcttggctcactgcaacctccacctcctgggtttaagcgattctcctgcctcagcctcccgagtagctgggattacaggcatgtgccactacacccggctaattttatatttttagtagagacggggtttctccatgttggtcaggctggtctcaaactcccgacctcatgtgatccacccacctctgcctcccaaagtgctgggattacaggtgtgaggcaccacacctggcctatgaagagtttttaacatgaagggatgttgaattttattgatggactttcctgcatctattgagataatcatgtgggttctttttttttttttttttagatctgcttatatgatgaattacattttttttttttagatctgcttatatgatgaattacatttattgatttgcatatgttgaaccagccttgcatcttgggaatgaagccaacttgatcatggtggatgagctttttgatgtgctggtgtattcagtttgcaagtattttattgataatttctgcattgatgttaattagtgataatatcctgaagttttcattttttgttgtatctctgccaggtttttgtatcaggatgatgctggcctcatacaatgtgttagggagaagtccctcctttttaattttttggaatagtgcataagaaagggtatcaacacctttttgtagttctggtagaattcagctgtaaattcatctggtcctgggctttttcttgttggtaggctattattgctccaatttcagaatttgttattggtctattcagggattcaacttctttctggttcagtctgaggagggtgtatttgttcaggagtttatccatttcttctaggttttctagtttatttgcatagaggtgtttatagtattatctgatggttatttgtatttctgcagggtaagtggtggtatcccccttctcatttctgattatgtttatttgaatcttctctcttctcttatttagtagtttagctagcaatctatctattttattgattttttttcaataaatctgcttctgaattcattaattttttgagtaatttttaatgtttctatctttcatagttccactctgagcttggttatttcttctgctagctctggggtttgtttgctcttggttctctagttcttttagctgtgatgttaggatttcaatttgagatctttctagctttttgatatgggcatttagtgctataaattttcctcttaaactgctttacctgtgtcccagaaattctggtatgttgtatctttgttctcattagtttcagaatttttttaatttctgccttaatctcattatatacccagaagtcattcaggagcaatttgttcaatttccttgtagttgtgtggttttaagtgagtttttaaatcttgagttataattcgattgcactgtggtctgagagactgttatgattttagttattttgcattttctaaggagtgtttcacttctaattatgtagtatattttagagtgagtgccatgtggcaccaagaaaaatgtatattatgttgtttttgtggggagagttctgtagatatctatcaggttcacttgatccagagctgagttcaagtcctgattatctttgttcattttctgtctcaatgaactgtctaatattgacactggggtattaaagtctcccactatttggccaggcgtggtggctcacaagtgctgtaatcccagcactttgggaggccgaggcaggtggatcacaaggtcaggagattgagaccatcctggctaacatggtgaaaccccatctctactaaaaaaaaaaaaaaaaaaatacaaaaaattagccaggcatggtggcgggtgcctgtactcctagctactcaggaggctaaggcaggagaatggtgtgaatctgggaggtggaacttgcagtgagctgagatcgcaccattgcactccagcctgggtgacagagtgagactctgtctcaaaaaaaataaataaataataaagtctcccattattattgtgggggagtctaagtctctttgtaggtttttgagaacttgttttatgaatctgcgtgcttctgtaatggttgcatatatatttaggatagttggcactttgtgttgaattgaaccatattctgttatgtaatgatcttttttttacctttgttggtttaaagtctattttgtcagaaacaaggattgcatctcctccttttttctgctttccatttgcttggtaaattcttttccatccctttattttgaacctatgtgttctctgcacatgaaatgtgtctcttgaatacagcacagtgatgagtcttgtctttttatccagcttgccattctgtgtcttttaactggggcatttagctcatttacatttaaagttaatattgttatatgtgaatttgatcctgtcatcatgatgctggctggttaattttgcagacttgttaatgtagttgcttcagtgttattggtctgtgtacttcaatgtctttttatggtgggtggtaacggatttcctttccatgtttagtgcttccttcaagagtttttgcaaggcaggatgaaatccttggtcattagcttgtctgcaaaggattttatttcttctttacttatgaagcttagtttggccagatatgtattctgggttgaaaattcttttcattaagaatgttgaatattggtccccaatctcttctggcttgtagggtttccactgagaggtttgctgttagtctgatgagcttccctttgttggtgacctggtctttctctctggctgcccttaactttttttttttatttcaaccttggagaatctgatgattatgtttttggggtggatggttcatggagtatcttattagggttctctggattttctggatttgaatgttggcctgtcttgccaggttggggaagttctcctggatgatctcctgaagtgtgttttccaacttggttccattctccccatctcttttaggtatgccagtcatttgcaggtttggtctttttacatagttccatagttctcagagtttttgttcattcctctttatttttttccctctaatcttgtctgcttgccttattgcagcaagatagtcttcgagtgctcacagtctttctttctcttggtcaattcagctattgatacttgtgtttgcatcatgcagttctcatgctctgtttttcagctccattggatcatttatgtttctttttaaactggttatctagttaacaactcctgtaatcttttattatggtccttagcttctttgaattgggttacaacataatcctttagctcagtgaagttcattattgcttactcacctcctgaagcctacttttgtcagttcatttatctgagcttcagccgagttctgtgtccttgctggagaggtttttttgcgatctattggagaagacgcattctggcttttggaattgtaagcatatttgcattggtttttcctcatctttgtggatttatctacctttgagatttgaatgaggttttttgtggtcgtcttgatgttgctgcttttttctctcttttttaacagtcttctcttctgcaggtctgctgcagtttgctgggggtcagtccactccagatgctgttcacctgggtatcaccagtgaaggctgcggaacagcaaagattgccacctgctccttcctctggaagcttcttcccctggaagcttcttcccacagggacactgacctgatgccagcctgaactctcctgtatgaggtgtcgggaacccctgttgggaggtctcacccagtcaggaggcacagattcaggaactgatttaaagaagcagattggatgctcctcactggtgtcagtgtattgtgctgtggggaatctccctcgtccagatcatcaggacacttcagagccagcaggcagaaaagattatacccactgaaccttagattatgaccgcccctcccccaggtgctctgacccagagagatgaaagttctgtctgtaaacttacagctgaagttcctggaatttgtccagggagactctgcccagtaaggacagatgtatccgtttcccacttaaagaagcagtctggccatgatctgccacagccactgtggctgtgctctggggactttcgcccagtccaaacctcagtctgtctaccactggcagaggaaaactaccaactagagtcacagttacggcagtcacctgtctctccaaaataaacttggttgcattatgcatacttcaggctgctttgctggccagcaggcattccaatccagtggtcttaccttgtggtattcaatgggagtgggatctgctgagtgagaccgcttggcacactggctttagtccccttcccacataagtgaatgaatctcctgcctcatgagttctggaagccactggagtttgcaaaaattcctgcaactaagtgcctgcctgaatggccgctgaccttagcagctgccacaggtccacacagctttgtgcttggaatgcaagggcctgttagtgtgggagcaaaagggactctcctaaaccacaaattgcaaaaatccataggaaaagtgtagtttttcacctgggtaacataatctctcactgcgtttctcggctgggggagggagttccctttcaccctgtgcaggtcctgggtgaactgtggccccaccctgctttttcttgttctctgtggtcacaccaactgcctagtcagttccagtgagagaatctaggtacttcagttagaaatgccgaattcacctgctgtttaaattcggtgggagttgcagaccggagctgtttctacttggccatctgggcccttcccaatataacacattattattaactatagacaccatgctgtacaatatatctcttgaatgtattcctcctatccaactataattatgtattgtctgacagacatcttcccaaacacccctttcttttaaattccttgggatctggtggtcaccattttactctctgcttcaatgaaattaagttttatagaatccatgtgtaggcgaaagtatgaaattttaatctttctgtgcctggcttatttcaagaaatataatgttctccaagttaatccatgtaattgaacataatagaattttcttttttaaaaataaatagtattttattgtgtgtatataccatactgtctttatttactcattagatgttgaactgttgcttctatattttggctgttgtgaagagtgttgcaaacaacagagaggtgcaaatgtttcttcattctcactttatttctcttaaatatatatgcaatagtgaaattgctgtattatagggtagtttgattttaaattttttgagaaatctctactttgtttttcttaatggctggcctcatttacattcacatcaacagtgtgcaagcattctcttcacatatttatcttttttttttctttttctttctaataggagtcattctaataagagcgagttgatatattatagattttttggctctcctctccctgataataattgacattgagggttttttttttttttttcgctgagtttcactctgttgcccagactggagtgcagtgtcacactctctgctcactgcagcctctgcctcccgggttcagcaattctcctgcctcagtctcccgagtagctgggattacaggtgcccaccaccatgcccagctaatttttgtatttttagtagaaactgagtttcgccatgttggccaggctagtctcaaactcctgacctcaagtgacccacctgccttggcctcccaaagtgctgggattacaggcatgagccactgcactcgggccacattgagaattttttaatatatctattggccatatgtatcttttcttaaaaaatatttaagccctttgctcattttagtagttatttgttttttgttgtatagtcatttgagtttcttacatattcttaatattaaccccttgtcaaatgtataaattgcaaaaaaaaattttagttttctcattttaagtgtgtcagattctgcacagcagctttataatttgaactaatcttactcatctattttttattttgttccctgggattttgagtttaaatcaaaaaaagttacagcccagactgatgttatggggctttcagtctatattttttgtagtagtctcagagtttcaggccttgcatttaagaatttatttgatttttatatatgaagtaagatgagggttgcattttattgctctgcatgttgctattaagtttttctcagcgccatttattgaagatactgttctttttctaagaaattgttacctttatctaaaatcagttagctggaagtacacagatatatttctaatttcccttttctgctccattggcctatgtgtctgttttttgttcaagtaccatactgttttatttgctttagctttgtagtatatttctttttttcttattattattatattttaagttttagggtacatgtgcacaacgtgcaggttagttacatatgtatacatgtgccatgctggtgtgctggctttgcagtatacttcaaagtcagatagggtgataacttctgtctttcttatttgctggagttctttgactattcagagtcttttgtggtaccataaaattttaaattttttaaaattttctattaaatatgtcaccggtattttgatagaggttgcattgtatctgtacatcattttgtgtaataaacatatttaacaatattaataactccaatgatgaatgagtaatgttttccatttgcatatgattttattttaatgttctttagattataatgtacaaatgtttcaactttttagttaaatttatttcaagttatagttactacagttagtgtagatgagattgttttgcattataatttcattttgagataattataagtgtatagaaatgctactgacaaattggcacctaattaaactaaagggcttctgcacagcaaaacaaactattgacaaacagacaacctaaagtataaaataaaatatttgcaagctgaatacaacataagattaatatatagaatctataagaaacttaatcagaaaaaagcaaatgatctaaatagacagtactcaaagaaagatataaaagctgttaatagggcagttccaagatagccgaacaggaacagctccagtctacagctcccagcatgagcgatgcagaaggtgggtgctttctgcatttccaactgaggcactgggttcatctcactggggattgtcggacagtgggtgcagcacactgagcatgagccaaagcagggcaaggcatcacctcacctgggaagtgcaaggggccagggaattccctttcctagccaagggaagcggtgacaaacagcacctggaaaatcaggtcactcccaccataacactgtgcttttccaatggtcttagcaaatggcacaccaggagattatatcctgtgcatggctcagagggtcctacacccacggatcctcgctcattgctaccacagcagtctgagatcgaactgcaaggtagcagcaaggctgggggaggggcgcccaccattgctgaggcttgagtaggtaaacaagtggctgggaagatcgaactggctggagcccaccactgctcaaggaggcctgcctacctctgtagactccacctctgggggcagggcatagccaaacaaaaggcagcagaaacctccacagacttaaatgtccctgtatgacagcttggaagagagtagtggttctcccagcacggagcttgagatctgagaatggacagactgcattctcacgtgggtcccagacccccaagtagcctaactgggaggcatcccccagtaggggcagactgacacctcacacagccaggtagccctctgagacaaaacttccacaggaatgatcaggcagcaatatttgctgttcaccaatattcgctgttctgcagcctccactgctgtcacccagcaaatgaggtctggagtggacctccggcaaactccacctgacctgcagctgaggatcctgatggttagaaggaaaactaacaaacagaaaggacatccacaccaaaaccccatctgtaagtcaccatcatcaaagaccaaaggtagataaaaccacaaagatggggaaaaaacagagcagaaaaactgaaaattctaaaaatctgagcacctctcctcctccaaaggaatgcagctcctcaccagcaatggaacaaagctggatggagaatgactttgacgagttgagagaagaaggttccagacgatcaaacttctctgagctaaaggaggaagtttgaacccatggcaaagaagttaaacaccttgaaaaaagattagacgaatggctaactaaaataaccaacgcagagaagtccttaaaagacctgatggagctgaaaaccatggcaagagaactacgtgatgaatgcacaagcttcagtagcagatttgatcaactggaagaaagggtatcagtgatggaagatcaaatgaatgaaatgaagtgagaagagcagtttagagaaaaaagaataaaaagaaacaaagcctccaagaaatatgggactatgtgaaaagaccaaatctacgtctgattggtgtacctgaaagtgacggggagaatggaaccaagttggaaaacactctgcaggatattatccaggagaacttccccaatctagcaaggcaggccaacattcagattcaggaaatacagagaaggccacaaagatactcctcgagaagagcaactccaagacacataattgtcagattcaccaaagttgaaatgaaggaaaaaatgttaagggcagccagggagaaagatcgggttacccacaaagggaagcccatcagactaacagcggatctctcagcagatactctagaagccagaagagagtggggaccaatattcaacattcttaaagaaaagaattttcaacccagaatttcatatccagccaaactaagcttcataagtgaaggagaaataaaatcctttacacacaagcaaatgctgagagattttgtcaccatcaggcctgccctacaagagctcctgaaggaagcactaaacatggaaaggaataagaggtaccagccactgcaaaaacatgccaaattgtaaagaccatcaatgctaggaagaaactacatcaactaacgagcaaaataaccagctaacatcataatgacaggatcaaattcacacgtaacaatattaaccttaaatgtaaatgggctaaatgctccaattaaaagacacagactggcaaattggataaagagtcaagacccatcagtgtgctgtattcaggaaacccatctcatgtgcagagacacacataggctgaaaataaagggatggaggaagatctaccaagcaaatagaaaacaaaaaaaggcaggggttgcaatcctagtctctgataaaacagactttaaaccaacaaagatcaaaagagacaaagaaggccattacataatggtaaagtgatcaattcaacaagaagagctaactctcttaaatatatatgaacccaatacaatacaggagcacccatattcataaagcaagtccttagagacctacaaagagacttagactcccacacaataataatgcgagactttaatacctcactgtcaacattagacagatcaacgagacagaaagttaacaaggatatccaggaattgaactcagctctgcaccaagcagacctaatagacatctacagaactttccaccccaaatcaacagaatatacattcttcttagcaccacactgcacttattccaaaattgaccacatagttggaagtaaagctctcctcagcaaatgtaaaagaacagaaattataacaaactgtctctcagaccacagtgcaatcaaactagaactcaggaataagaaactcactcaaaaccactccaactacatggaaactgaacaacgtgctcctgaatgactactgggtacataatgaaatgaagacagaaataaagatattctttgaaaccaacgagaccaaagacacaacatgccagaatctctgggacacattgaaagtagtgtgtagacggaaatttatagcgctaaatggccacaagagaaagcaggaaagatctaaaattgacaccctaacatcacaattaaaagaactagagaagcaagagcaaacacattcaaaagttagcagatggcaagaaataactaagatcagagcagaactgaaggagatagagacacaaaaaaaaccttcaaaaaatcaacgaatccaggagctggttttttgaaaagagcaacaaaattgatagaccactagcaagactaataaagaagaaaagagagaagaatcaaatagatgcaataaaaaatgataaacgggttttttgaaaagatcaaaaaaattgatagaccactagcaagactaacaaagaagaaaagagagaagaataaaatagacgcaataaaaaatgataaaggggatatcaccaccaatcccacggaaatacaaactaccatcagagaatactataaacacctctacccaaataaactagaaaatctagaagaaatggataaattccttgacacatacactctcccaagactaaaccagcaagaagttgaatctctgaatagaccaaaacaggctctgaaattgaggcaataattaataacttaccaaccaaaaaaagtccaggaccagacggattcacagccgaattcttccagaggtacaaggaggagctggtaccattccttctgaaactattccaatcaatagaaaaagagggaatcctccctaactcattttatgaggccagcatcatcctgataccaaagcctggcagagacacaacaaaaaaagagaattttagaccaatatctctgatgaacatcgatgcaaaaattctcaataaaatactggcaaacccaatccagcagcacatcaaaaagcttatccaccatgatcaagtgggcttcatccctgggatgcaaggctggttcaacatacacaaatcaataaacgtaatccatcatataaacagaaccaaagacaaaaaccacatgattatctcaatagatgcagaaaaggcctttgacaaaattcaacaacccttcatgctaaaaactctcaataaattaggtattgatgggacatatctcaaaataataacagctatctatgacaaacccacagccaatatcatactgaatggacaaaaactggaagcattccctttgaaaactggcacaagacagggatgtcctctctcaccgctcctattcaacatagtgttggaagttctggcgagagcaatcaggcaggagaaagaaataaagggtattcaattaagaaaagagggagtcaaattgtccctgtttgcagatgacatgattgtatatctagaaaaccccatcgtctcagcccaaaatctccttaagctgacaagcaaattcagcaaagtctcaggatacaaaatcaatgtgcaaaaatcacaagcattcttatacaccagtaacagacaaacagagagccaaatcatgagtgaactcccattcacaattgcttcaaagagaataaaatacctaggaatccaacttacaagggatgtgaaggacctcttcaaggagaactacaaaccactgttcaatgaaataaaaaaggatacaaacaaatggaagaacattccatgctcatggataggaaggatcaatatcatgaaaatggctatactgcccaaggtaatttatagattcaatgccatccccaacaagctaccaatgactttcttcacagaattggaaaaaacgactttaaagttcatatggaaccaaaaaaagagcccacattgccaagtcaatcctaagccaaaagaacaaagctggaggcatcacactacctgacttcaaactatactacaaggctacagtaaccaaaacagcatagtacttgtaccaaaacagacatacagaccaatggaacagaacagagccctcagaaataatgccacacatctacaactatctgatatttgacaaacctgacaaaaaaagaaatggggaaaggattccctatttaacaaattgtgctgggaaaactggctagccatatgtagaaagctgaaactggatcccttccttacaccttatactaaaattaattcaagatggattaaagacttaaatgttagacctaaaaccataaaaaccctagaagaaaataaaggcaataccattcaggacataggcatgggcaaggacttcatgtctaaaacaccaaaagcaatggcaacaaaagccaaaattgacaaatgggatctaattaaactaaagagcttctgcacagcaaaagaaactaccatcagagtgaacaggcaacctacagaatgggagaaaatttttgcaatctactcatcgacaaagggctaatatccagaatctacaaagaactccaacaaatttacaagaaaaaacaaacaaccccatcaacaaatgggtgaaggatatgaacagacacttctcaaaagaagatatttatgcagccaacagacaatgaaaaaatgctcagcatcactggccatcagagaaatgcaaatcaaaaccacaatgagataccatctcacaccagttagaatggcgaccattaaaaagtcaggaaacaacaggtgctggagaggatgtggagaaataggaacacttttactctcttggtaggactataaactagttcaacctttgtggaagacagtgtggtgattcctcagggatctagaactagaaataccatttgacccagccatcccattacgggatatacacccaaaggattataaatcatgctgctataaagacacatgcacaagtatgtttattgtggcactattcacaatagcaaagacctggaaccaaccctaatgtccaacaatgagagactggattaagaaaatatggcacatatacaccatggaatactatgcagccataaaaaatgatgagttcatgtcctttgtagggacatggatgaagctggaaatcatcattgtcagcaaactatcgcaaggacaaaaaaccaaacattgcatgttctcactcataggtgggaattgaacaatgagaacacttggacacaggaagggggacatcacacaccggggcctgttgtggggtggggggaggagggagggatagcattaggagatacacctaatgtaaatgacaagttaatgggtgcagcacaccaacatggcatatgtatacatatgtaacaaacctgcacgttgtgcacatgtaccctagaacttaaagtataataattttaaaaaagctgttaataaacatgcaaaaaattgctaaacattcctaatagagagacataaatcaaaatgacaatgtcatatcatcccacatccgttagattggctgttgttagaaagtcaaaaaataacagatgtttaagttatggagaaaaggaaatcttgaaacactgtgaaaatgcaaattaattcagccccaatgaaaagcagtttggagatttctcaaagaactaagaatataattgccatttgacccatcagtcatattactgggtatatacccaaaggaaaaataaattattttatcaaaaagacacctgcattcatctgtttattactgcattattcacaatagcaaaaacataatttttttttgagacagagtcttgctcttgttgctcagcatggcacggtctcgactcactgcaacctccacctcccaggttcaagtgattctcctgcctcagcctcccaagtagctggcattacaggcacccaccaacacacctggctaatttttgtattttcagtagagatggggttttgccatgtcggccagactggtctcaaactcttgacctcgtgatccccccacctcggcatcccaaagcgctgggattacaggcatgagcctccacacctggccaaacaaaattaaattagatatccatacatcttaaattggatttttaaaaaatgaggtacttacacactgtgcaataatatgcagccacagaaaagaatgaaataatgttttttgcagcagcatgaatgcagaagaagaccattactttaggcaaattaacacagaacaggaaaatatcaacatgttctcatttatacgtgggagctaatcattgcatgtgcatggaaacaaagatggaaaaaataaacactggaaattctaaaaaaggaggaagggagacaaacattaaaaaactatgtatcaggtatgatgtacactacttgggcaatggaattatcaagtccccaaacctcaacatcatgcgctatgttacaggtctgcacctgtaccctctgaatctaacataaaaataatagaaagctctgtgataaaatgatatgtcacatttctccagttctgggttactagttgaaattaggagtgaaaaacagaattatgacccctttcgccataagggtgaatgtttctatgctcggtctccccatattctataaaccaacctctcagaaagctctaaacatatgtcccaagaagtgttgtatttccaagtgtgaaactaaaataaatgactctacatctttatttttaatgttttaactgttcactagactacagagttaatgtattaccctgctttattggggaaaaatgataagtggtttaatcacatttcttctttagaataaaccatttatgaaaatgtgaggctgtggaaatcatgctaaattactgaattggaaagagaaactgtttttgtaaagaacagcatagaagttttatagccatagcccaaatatgatgaaacagagtgtgggatatttaggaccacacagctactaaatgttcacttcatcacgacccttcttgtgaaaaaaggaataacgagtcagcaggtacttttagaatacttttctgattcttctgtagtgttaaattttttgtctttattatatgccatataaaagtctttacttccacaaaagatgccatgagttcaaagttaatatgctcacaaatatattctccctagaagggcactactctgtttgcagtcaaggtgtagcatttttggcctttttttttttttttttttttgctgatatgtttgtgtgaaataggcaggaagtaaagcaaagttaatcataacatttctagattctataactacagcatctgaaatctagcattatgtcaactagaaataatgacaatatttcaaagctgaaaaaataaattgataaatactttatatgtttatttttaatagtttataaaaatttatagtttctaaattataggttaaactagttgaacatgcagatacctaaaagttctatttggatgatagtattaatattttaatattttatgattgtgaatcactactgccttattgggttaactgtaaagcagttatttatcttctaaatgtaaacagagaagaggattttcataatcttaagcatacagatttattaagattagcactttgtttagatttgaataaaatttataggtttttagtaataaaaaatttagcagtttttctagtagaaataaaacagcaatataaatatgtttttaaaaatctgtttaaaagaaactttacatgtgtttgttaaataacatttaaaaccacattgcaagtgactgattagtaattccaatctttattttagtcactgagaaaacttagtatactttaattattcaatagaaaagagtattcttatattagtgttcctgaaactttcagaaactatagaccactcaatagatgatgatgtagatgcagaacacaaatgttctatataatagactcagcatttttttttttttttttttttgagatgaagtctagctctgtcgcccaggctggagtgcagtggcatgatctcggctcactgcaacctctgcctcccaggttcaagagattcccctgcctcagcctcccgagtagctgggattacaggcgcctgccaccacgcccggctaatttttgtacttttagtagagacagggtttcactgtgttggccaggcaggtctcaaacttctgatctcatgatccacccgtctcggcctcctaaagtgctgggattacaagcgtgagccaccgtgcctggcctcatcctagcttttaatataaacattcaaaagtaaaattaatggcctttttttttgagacagagtctcacttatcgccaggctggagtgtagtggtgccatctggactcactgcaacctccgcctcccgtgttcaagcgattctcctgcctcaaactcccaagtagctgggactacaggagcgcgccaccacgcccagctaatttttgtatttttagtagagacggggtttcaccatgttggccaggattgtctcgatctcttgacctcatgattcgcctgcctggacctcccaaagtcctgggattacaggcgtgagccactgcaccgggcccttttattttttattatttatttatttatttatttatttatttatttatttatttatttatttattgagacggagtctggctctgtcgccaggctggaatgatgcagtggtgcgatcttggctcactgcaacctccgccttccgggttcaagcaattctcctgcctcagcctcccgagtaactgggactacaggggcgtgccaccacgcccgcctaattttgtatttttagtagagatggggtttcaccatgtttgtcaggctggtctctaacacctgacctcaggtgatctgcccgcccaggcctcccaaagtactgggattacaggcttgagcccggccaattagtgtctcttttaagtcacgaaagggataacattgttagaatccatttaccaaagtatttgtgttaggcttagtaacaagaactctaaaccaaatatcagggtctacatactatctaagggtgaaaaaaaaaaacccttgttttaaaatttctctttatttctacgaagttagaaaattcaaagctaaaaatcttatgtcaggaataaaaacaagtattgggtgagagggtgttgggcctaatggtgaagattgaaactcattatcagggagttcctgattgcatctcactgatacaaagtgaagaaggtactgaaatagcgaaaaacagtgatataaattgagtacttacatataaaatacaatttttaataaaaagtagcatttaatgtacagctatagatgagaacttttggtcaaatattacctgccttcaatagaaataaaaaaaattattttgtatgtattttctttttttcttttttctttttttcttttttttttttttttttgagacggagtctcactttgtcaccccggctggagtgcagtggcaatctcggctcactgcaacctccgccacctgagttcaatcgattctcccatctcagctgcacaagtagctgggactacaggtgcatgccacagcccagctaacttttgtattttttagtagagacggggtttcaccatgttggccaggctggtctcaagctcctgaccttaagtgatcctcccttctcagcctcccaaagtattgagattatattcttgagccaccgccctcggccataaaaaaaattctttattttaccacaagcattttattattgatgcatatgcttattttgcttaaaatacagtatcttttgatgaaagacttatacttttctttcagtgtgttatttattgctgagaagtggctgtccggctaagaaactgctattctcagcaacaaccacattgactaatagtgaatggaagtgatgtgtggataagaagcaaatgtgtcttctctgcatctcttttttcatccattggctgaagaacgagaaagatgtagagagaaaatgaaagaagatgtaattcctaaaaaatgatgaagtcctcttttggtttttttgtttgttttttggttttcctttttttttttttttttttttttgggacttagtctcgctctgtcacccaggctggagatctcgactcactgcaacctcagcctcccgggttcaagcgattttcctgcctcagcctcgagagtagctgggactacaggctctgtgccaccgagcccagctactttttgtatttttagtaggacagggtttcaccgtgttagctaggatggtctcgatctcctgaccttgtgatctgcctgcctcagcctcccaaagtgctgggattacaggcgtgaaccaccgcgcctgcctttgaagtcctcttaacaacaacaaaaacttacacaggaggccgggagcagtggctcattcctctaattccagcactttgggaggccgaggtgggcagatcacctgaggtcaggggttcgagaccagcctggccaacatggcgaaaccccgtctctactaaaaatacaaaaattagctgggcgtggtggcacgtgtacctgtaatcccagctactcgggaggctgaggcaggagaatcacttgaaacccggaggcagaggttgcagtgagccgagatggtgccattgcactccagcctgggtaacaagagtggaactctgtctcagggaaaaataaactcacaggagatagtgacatgagtagaaaatatactattttgtgaatcatctgaaattgtaatatacaacccaaactgctttaacaaatatattattccttcagttctgactcatcaagatatgattcaattgcctggtgaatcaaagctgagatgataataacttattttacttagcataatgtcctcgaggttcatcaatattgtcgcaaatgacaatactttcttctttttaagggctaaatagcattctgtggtgtaaatataccacattttctatattcattcacctgttgaagaacacttggctcatacaatatcttagctactgtgagtaatcctctttcttctttttttaatttgtttttatatctcttttttctttacttttttaatttctagaagtattttaactttatttatttatttatttagagacgaagtttcgctcttgttgcccaggctggagtacaatagtgctaactttatttatttatttacagacgaagttttgctcttgttgcccaggctggagtgcaatagtgcgatctcagctcaccacaacctccgcctcctgggttcaagcgattctcctgcctcagcctcccaagtagctgggattacaggcatgtgccaccatgcccggctaatttttgtatttttagtagagacagggtttctccatgttggtcaggctggtctcgaactcctgacctcaggtgatccgctcacctcggtcccctaaagtgctgggattacaggcgtgagcaactgagccaggccattttaactttaaaatataaattgtgtcttttgaccaggcccggtggttcacgcctgtaatcccagcactttgggaggccgaggtgggtggatcacctgaggtcgggagctcaacctcccgacctgacacatggagaaaccccgtctctactaaaaatataattagctgggcgtggtgggcgcctgtagtcccagctactcaggaggctgaggcagaagaatcacttaaacccgggaagcagaggtagcgatgagctgagatagcgccattgcactccagcctgggcaacaagagcgaaactcagtgtcaaaaaaaaaagaaaagaaaagaaaagaaaagaaataaagaaacaaataaataaaaactctctgctctgcttaatcagcggtcaccttattttcacacttcaaaggcattttagctgcctgaaaagcagagttacagttcaagtgcgtgtgctgagctggtcctcaacagtgtcagtctattcaaattcacacagatgatcttctggtaaaaatagtgcagttcaacagcattaccacggcaatgtggaacacatgtaataaaataaaagttaggctgggcacggtggctcacgcctgtaatcccagcactttgggaggccgaggtgggcggatcacttgaggtcgggattcaaggccagcctgaccaacatggtgagacccccgtctctactaaaaatacaaaatattagccaggcatggtggcatgtgcctgtaatcccagctactcgggaggctgaggtggaagaatagcttgaacccaggaagtggaggttgcagtgggccaagatcacgccatcacactccagcttgggcgacagagtgagactccgtctcaaaaaaaaaaaaaaaaattctccaccacggatgtgttttttactgtcatcatgagtaaaagatcagtttgagaacaggtaaaatcaaaatgcgcatgctctctacagagaaattttcctactgcagatagctttgcttgaattacctgaaatacaatgtaaatgatggggcttattgagttgacaatatgcagtcaccattacagtcgccatggttgctgcatgctgaggacatggtcactttcttgactacctctcctatctcaataatacttgtctttatttattcctaactaccaactttgagataagattcaactgttacatcatcattgtcaacagtgggaaaatcaatttttttttttttttttgagacagagttgctcttgttgcccaggctggagtgcagtggcacgatctcagctcactgccacctccacctcctgggtttaagcaattatcctgcctcagcctcccgagtagctgggattacaggcatgtgccaccacgtctgtctaattttgtacttttagtatttttagtagagacaaggtttctccatgctggccaggctggtctcaaactcccgacctcaggtgatccgcccacctcagcctcccaaagtgctgggattacaggcgtgagccactgcacctggccgggaaaatcaaaattttaaaatcaaacatatttgagctagctttgggtcattagctgtgtgcccaagagaaattattttacatccttggagcttcaattttcattactagtaaaacattctatttttcacagggctgctttaattcacacctggtagctacaagtcttttcactgaaagtcttttttatatatgtatattaaatatttaacaataaaaataaaattattcatatttaaagatattctaattgagtgggtatattttgtcatatttaatgtatttatcctttctaaaaaataccaaaataagaattttattatttttcctggaataacatattaagggtgtctacattgtgactttgctcatttttgcatatggttttgactgctgctgttgaatttaggctgaattttaaacccactgttgtctagcttgtgtgattttagttcatttggggaaccaaatatattagacatggattgtttggggtaacttggcttcatttctactgtctttctgttattacatctgaagatttagaaatgactaggattcaaataaggttgatttggaatcaggcacagaaaatcccagaaaagactgtggaaaatagttacttgatagtgcctttcagtgagatttatacatgaaacagagttcaataaaattattgcaagtttgttaaatttcaaatctaattgcctgtaacatattaggcgcttgtcttagtttgtctatggcatcgtagcttggagaagctgacattacagaaaggatattgctacattaataagattaggaacaaatactaatgtgcttgtaaacatttgccttaatattctttagatacatgccactctggctcaattcttttggtacaactgtttatgattccagagactcctttccaccaaattcaagtcacggtgttttcagcttcttatgtttatttttacccagtaatcttcatagttgacattatgatgttggaatcccccaggcaatccctgagccttacagcgaccatcctaccttatccgtcttgtttcacattctctgttgttgagtccctctcaccccatattggagctttaatgaggcctcaatggtttggaggaaacagtggaatggattgccatatatgttgagttgagaacaagggtcctcttgaggataaacactttacatttattattcatagtacaaagcagtatttttaagatgtgaacatgtttcactcaaattaaatatgaatgatttatcagtatgacaatatagtaaaattaactgcatcaagttcaccaaatgtttcgctttggactctccaaacacaaagattcatatgtatgcattggtggatgttagctttttttggtgtaagtttttgtttgttttcatttttaaagatttttgcctactttatagctcatgttaagctacagaaagcttacgaaaagctttattttatcaatttttttaaccaaatgtttaaatattgaaagtgacattttggattactacttttcactgatgtagtttgcatttattagtacatttcagtttttccttatgtggtgtaaggttttaaaaattccttccaggccgggtgcggtggctcacgcctttgatccccgcagtttgggaggcggaggcgggcgggtaaactaaggtcaggagttgaagaccagcctggccaacatggtgaaaccccgtctctattaaaaacataaaaattagcccggcgcggtggcgcgcgtctgtagtcagagctactcgggaggttaagacaggagaaccacttgaacccaggaggtggaagtttcagtgagccgagattgcgccactgcactccagcctagcgacagagcgagactctgtctcaaaaaaaaaaaaaaaaaaaaaagccgggcatgatggtgggtggctgtagtgccagctattcgggaggctgaggcaggagaatcacttgaacccgggaagtggaggttgcaatgagccaagatcgggccactgcactcctgcctggcaacagagcgagattcagtctcaggaaaaaaaaaaaaaaatccttccagttgattgtttaggtaacagcaaaatctgttttcttagacagcagcataagaattattgatatgccacctttagaggtactggaagcaactggataaatgtgctgaaatctgcatttatttataggctcattagaggctaagtcatagcaacatatgttagttccattcaatttttttttgtctaaattttgtcgagccacatccatctgtatatataactctatcttggtaacagcttttttattctaagccagaacttgttttaactggtggcttcattttaaatgtgtcagctgtattataacacattcgaataagtaatagaaattttattcaaaaaatatggatagaaaagtcatacaggcacactgaaaataaattggaatctagcacgtgacactaattaacaggtggagcatattagactagactaaaatccctgtaaacaataccgaaagacagaattttttaattaaaaacatcttcaggcaggcgtggtggctcacgcctgtaatctcagcactttgggaggctgtggcaggtggatcacctgaggtcaggagttcagaccagcctggccaacatggaaaaaccccgtttctactaaaaatacaaaaaaaattagcccggcgtggtggtaggcacctgtaatcccagctacttgggaggctgaggcaggagaatcgcttgaacctgggaggcagagattgcagtgagctaagatcgcaccattgcactccagccggggcaacaagagggaaactccgtctaaaaaaaaaaaaaaaattcaacaatttaataggcctatgagatatttataaaattgatttgtttacccatcatcaatcaatatcaatttaaactagaaaattttaaacacatcatacaaaaaatataattactcaactatcccctgacttaatctgattaaagcaagacttctggatatttcaaaatgctaaattattggtgaaaaatattcatcttgaacagctcttttatatatatattactactaagtaaaacctaatactgataggtatgatttatgaaatgtttgtgaatgtctatcacagtagtcagaaaatcaaaaaattattttaatctgctgtctaaataattttgatttaaatatttggtattttaattgagtggcagcatatatgtgtgtgtatatatatatatacactaatcaccatttctttactattttgccattttataaaataagcctgaatttgtggagacatttttttaaaatcctatcttttattaaaaaaaaaaaaatttaggccaggagcagtggctcatgcctgtaatcccagcactttgggaggctgaggcaggtagatcacctgaggtcaggagtttgagaccagcctgactaacctggtgaaacccagtgtctactaaatacaaaaaattagtgggcatggtggtgcatgcctgtaatcccagctactagggtggctgaggcaggagaatcacttgaacctggggaagcggaggttgcagtgagccaatattgcaccattgcactccagcctaggcaacaagagcgaagctccatctcaagaaaaaaaaaaaaaaaagactcagacatcaaaaagtaaatatactaaagtcataatattacatagtttgctaaacgctacagtaatttgtaaagtttgtttatgcataccaatcttagattatctaaaacataataaagtttcttttttatgttatattaaacatacaaaagtccaaaatatatccagacacacaagagctgtggctggcattttaagaaacaaataatttagcactatacactgttctgtatatatacagatgaaaaacaaaaccttgaagttttcaaatcataaacagaaatattatttgtgagtctgaacctcaaatatataatactaatacatacagtttactctggctctaatacttagaccctttttatctatgggttccaccttcatggaatcagccaaccatgtctggaaaatatttgggaagaaattcccacaaagtacccaaaagcaaaacttaaaacctcaccaagtactatgttgcacttatgctaatgaagtaatgcataggtattatattaggtattataaattaatattaggtattataaataatttagagataatttaaagtatatagtcggatgtacataggttatgtgcaagcactacactattttatatcagaaacttgagactccttggattttggtatccatggaggagagtagggttggtcctgaaaccaatcccccttgaataccaaggggcgactgtacttctagacatccatgtaataatacgtctctgttggcatgatgtaaggatccagtgggatcatttaggttaagtaagcactgggcctggcacatgagaagtcttcactacatgttacctacggcttcatggcttccttctttttttttttttttttttgagacagtgtcttgctctatcgcccagactggagtgcagtggtgtgatctcagcttactgcaacctctgcctcccaggctcaagcaattcttgtgcctcaccctcttgagtagctgggactacaggggtgcatgcctggctaatttttgtatttttagtagagatggtgttttgctatgttggccaggctggttttgaactcctgacctcaagtggctgcttgccttggcctcccaaagtactgggattgcaaaagtgagccattgtgcccggcccagtttactctttttaatttaaaatatactgtacttttgtgttggatcatcatggaggacaggaggcaggactagattgcatctccagacagagcagcttgctgaagcttgcatcgtgaattttagctccatatctactgcaagaacaagccagaaatcccaagaggacccacagaccctctgaagaaaatggactgctcctgcaggatccaggagactctccaaatactgtgagtgtccaaactgtagaagtaggaaagggagattctcctctcctgaacacacacccccactggagaagctaaaggtctgtttataggagaagtttctgaatttacatggaactgagtcaatttagatagccaagcgaaatataggggtagaggaagcagcagaaaggcctgggagctcactgaatcccctagtgggccatttttgtctggcaccaaagggatccatcaggagggtgaccagaggagcaggaggtaaaactccacagggagaaggaaatctctagctgaactttgtgacaatttgaatggggcaagaagcttctctcctgtatccacagctgagaagccctctgtgggtagggcacaaatctggtgtgcagatttcacaggtgggggaagaaccaagcccctttctttcacatttgggaggtggttagctgggggcaagttttcaagcccatcacaccctctgcctggaagaaggctcggggctgttgcagggtacatggtaggagggagaccagctctttggtttgtgtgggagctggctggggcctgtgactgtcagccttccccaacttccctaacaacatacatgactcagcagaggcagccataatcctcctaggtacacaactccagtgacctgggaatctcacccccataccccacagcagccacagcaagacctgcccaagaggagtctgaactcaggcacacctatccccgcccccacctgatggtccttttctatctaccctggtagcaaaagtcaaaggacatataatcttgggagttctagggctccgcctacttccggtccccctctatattactacagctgatgcttttctggaaagcaccacctcctggcaggagacaaaccagcacaaaactagagcattaaaccaccaaaactgaaaaccttcacagagtctattgcaccccgctgccacctgcactagaacaggtgctggtatccacagctgagaagcctatagatggttcacatcacaggactctgtgcagacaactccagtaccagcgcagagtcacatagacttgctgggtggctagacccagaagagagacaaaaatctctgcattttggcacgtagggagtcacatccataggaaaaggggaagagtactacaacacccagtgggacaaaagaactgaaaacagccttcagccctggactttccctctgacagagcctaccaaaatgagaagtcagaaaacaaacccttgtaatatggcaaaacaaggctctttaacaccccccaaaaaatcacactagttcaccagcaatggattcaaaccaagaagaaatccctaatttacctgaagaataactcaggaggttaattattaagctaatcagggagaggtcagagaaaggtgaagcccaatgcaagaaaatccaaaaaaaatcatacaagaagtaaagggaggaatattcaaggaaattgatagctgaaagaaaaaacaataaaaaattcaggaaactttggacacaattttagaaatgtgaaatgctctgaaaagtctccacaatagaattgaacaagtagaagaaaaattcagggctctaagacaaggtctttgaattaactcaatccaacaaagacaaaaataaataaataaataagaataagaaaatatgaacaaagtctccaagaagtctggaattatgttaaatgaccaaacaagaataatcagtgctgctgaagaagaagagaaacctaaaagtttggaaaacatatttaggggaataattgagaaaagctttcctggccttgctagagacctagacatccaaatgcaagaagcacaaagaacacctgggaaattcatctcaaaaagattgttgcttaggcacattttcatcaggttatctaatgttaagatgaaggaaagaatattaagagctgtgagacaaaagcaccaggtaacctataaaacaaaacctatcagattaacagcagatttctcagtagaaactctacaagcgagaagggattgaggatctatcttcagccttctcgaacaaagcaattatcagccaagaattttgtatccagcaaaattaagcttcacatatgaagaaaagataataattttcagacaaacaaatgctgaatttgccattatcaagtcaccactacaaaacagctaaaagagagctaaatcttgaaacaaattctgaaaacatatcaaaacagaacctctttaaagcgtaaatctcacaggacctaaaaaacaaaaatacaatttaaaaaacaaaaacaaacaaagtatacagacaacaaatagcatgatgaatggaatggtgcctcacatctcaatactaacactgaatgtaaatagactaaatgctctacttaaatgacacagaattgcagaatgaataagcattccccaaccaaccatctgctgccttcaagagactcacctaacacataaggactcgcaaaaacttaaggtaaagtggtggaaaaacatttcatgcaaatggacaccaaaagcaagcaggagtagctactcttaaatcagacaaaacaaactttaaggcaacagcagttaaaaaagacaaaggacattatataatgataaaaagccttgtccagcaggaaaatatcacaattctatacatatatgcacctaacagtggagatcccaaattgataaaacaattactaatagacctaagaaatgagatagacagcaacacaataatagtgggagattttaattctccactgacagcactagaaaggtcacctgggtgtggtggctcatgcctgtaatcccagcactttgggaggctaaggcaggcagatcagctgaggtcaggagttcaagaccagcctgatcaagatgatgaaaccctgtctctacaaaagtaaaaaaattagctgggcatgatagcaggtaccggtaatcccagctacttgggaggctgaggtgagagaatcacttgaacttgggaggtggaggttgcagtgagccaagatcatgccattgcactctagcctgggtgagagagcagatttcatctaagaaaaaaaaaagtcatcaagacagtatacaaagaaacaatgtactgaaactatacacgggaacaaatgtatctctctctctctctctctctatatatatatatagatatatagatatagatatagatatatagatatatctacctgtgtcgaggcatagtgttacacactttatttcaattatttaatttgattttaacaatgagatggataatatcctgctcattttacagatgagacaattgagccttaaaggttaaacaaatgatttcctaagctcattcagccaataaacggtaggggactgcttgactccagcccagttgatcctcaaatccatgatttctgccaccatattcacagaaacaagacaagctgaaagtatagcctgactcttgaaacagtcaaagaattgtgtacgtttatgaaagatatagatatatagatatctatatatctatctatatacagatagatatctatatatctatctatatacagatagatatctatatatctatctatatacagatagatatctatatatctatctatatacagatagatatatatatagagagagaacatttcatccaacaaccacagaatatacattctattcaaaagtgcatggaactttcaccaagacagaccatatgacaggccacataatgagcctcgataaatttaagaaaattaaaattctatcaagcactctctcagaccacagcggaataaaactggaaatcaactccaaaaggaacccccaaaatcacgcaaatacatggaaattgaataacctgctcctgaatgattattgggtcaaaaatgaaattaagaggaaaattataaaattcttctaactgaatgaaaaaggggacaaaatctatcaaaacctccaggacacagctaaggtggtgcaaagaggaatgcttatagccctaaatgcctacatcaaagtctgaaagagcacagacaatctaaggtcgcatctcaaggaaataaaggaacaaaaacaaaccaaacccaaacctagcagaagaaaggaaataaccaatatcagagcagaattaaataaagttgaaacaaagaaaacaacacaaaaaataaatttaacaaaaagctggttctttgaaaagataaagaaaactgatagaccattagcaagattaaccaaaaaaataagagagaaaagccaaataagctcaacaaggaatgaaacaagatacaactgacaccccagaaatacaaaagatcattcaaggctactatgaacacttttatgtgcataaactagaaaacctgtaagagatggataaattcctggaaagatacaaccctcctagcttaaatcaggaagaattagatatcctgaacaaaccaataacaagcaacaagattgaaatgataattaaaaaattacaaacaaaaaaaagtccaggaccagacagattcacagcagaattctaccagatatacaaagaagagttggtaccaatcctattgacactatttcacaagatggagagagagaaaacccttccttgggttttccttcattctatgaacccagtatcattttaatgccaaaaccaggaaaggatataaccaaaaacaaacaaacaaaaaactacagaccaatatccctgatgaaaatagatgctaaaatccttaacaaaatactagctaaccgaatctgacaacatatcaacaaagcatgatcaagtgggtttcataccagggatgcagggttggtttaacattgcaagtcaataaatgtgatataccacctaaacagaattaaaaacaaaaaacacatgatcatctcaatagatgcagaaaaaacatttgacaaaatccagcattgctttatgattaaaactctcagcaaaataggcatacaaggaacatacctcaatgtaataaaagccatctatgacaaacccacagccaacataatactgcatgtggaagagttgaaaccattttctctgagaactgtaacaagacaaggatgcccactctcaccactcctcttcaacatagtactggaagtcctagccagagcaatcaaacaagagaaataaagagcatccaaatcagtaaagaggaaggtcaaactgtcactgtttgctgatgatataattgtttacttagaaaaccctaaagactcctccagaaagcttctagaactgataaaagaattcagcaaagtttccagacacaaaattaatgtacacaaattagtagctcttctgtataccaacagtgaccaagctgagaatcagatcaggaactcaaccccttttacgatagctgcaaaaaaaattaaatgcttaggaatatgtctaaccaaggaggtgaaagctttctacaaagaaaactacaaaacactgctgaaagaaatcatagacaacacaaacaaatagaattacctcccatgctcagggatgggtagaatcaatattgtgaaaatgaccatactgtcaaaagcaatctacaaattcaatgcaattcccatccaaataccactatgattcttcagagttagaaaaaacaattctaaacttcatattaaactgaaaaacagctcatatagccaaagcaagactaactaaaaagaacaaatctggaggcatcacattacctgatttcaaactgtactataagacgatagtcaccaaaacagcatggtactggtataaaaataggcacatagaccaatggaacaaaatagagaacccagagataaacccaaatacttacagccaactgatcatcaacaaaacaaacaaaaacattatatggggaaaggatacccttttcaacaaattgtgctgggataattggctagtcacatgtaggaaaataaaactggatcctcacctcgcctctcaccttatacaaaaatcagctcaagatggattaaggacttaaatctaagacttgaaactagaacattgaaaaaaacccttctagacattggcttaggcaggacttcatgaccaagaacccaaaagcaaatgcaataaaacaaagataaattgctgggacttaattaaactaaagagcctttgcatggcaaaagtaaagtcagcagagtaaacagaaaacccacagagtgggaaaaatctttacaatctacacatctgacaaagaactaatatccaaaatctacaaagaactcaaaaaaagcaacaagaataaaaaagaaacaatccttccaaaaagtaggctaaggacatgaatacacaattataaaaagaagacatataaatggctaacaaacatatggaaaaaatgctcaacatcactaatgatcaggaaaatgcaaatcaaaaccacaatgtgataccaacttactcctgcaagaatggccgtaatcaagaaatcaaaaaatagtagatgttggcatggattcaatgaacaaagaacacttctgtactgtgggtgggaatgtaaactagtacaaccactatggaaatcagggtggagattccttaaataactaaaagtagaactaccatttgatccagcaattccataactgggtacccagaaaaaaagaagtcattatgtgaaaaagatacctgcacatgcatgtttatagcagtacaattcacaattgcaaaatcgtgcccaaatgcccatcaattgagtggattaagaaactgtggtatacgtataggatgggaatactatccaagccttaaaaaggaatgaacgaatggcattctcagcgacctggttgagattggagactattattctaagtgaagtaactcaggaatggaaaaccaaacatcatatgttctcactaataagtggaagctgtgttgtaaggatgcaaagacataaaaataatataatggactttggggatacagggagaaagggtagaaagggggtgagggataaaagactacaaatagggtccagtgtatactgctcaggtgatgggtgcaccagactctcacaaatcaccactaaagaacttacttatgtaaccaaacaccacctgttccccaataacctttggaaataaaaacaatttttaaaaaatgtcactctcagcacatgcagtttcagctttgcttcagagacctgaattactttgattcgtggtccagctaaaattaaattaaattaaattttaaaatgtcaacgttttcaaaggaagtacaataagcctgaaaatattttagataaaaatatttttgtaaatttgacaggttaaggccgggcgcggtggctcacgcctgtaatcccagcactttgggaagccgaggcgaacggatcacgaggtcgggagatcgagatcatcctggctaacatggtgaaaccccgtctctactaaaaatacaaaaaaaagaaaaaaaaaaaatagccgggcatggcagtaggcgcctatagtcctagttactcgggaggctgaggcaggagaatggcatgaacctgggaggctgagcttgcagtgagccgagattgcaccactgcactccagcctgggcgacagagcgagactccatctcaaaaataaaaaaataaaaaattacgggttaatgtggtataagactaaactaattagtagagtacatttgaaacacttcagattacaaatatttagtcctttttaggatacagttttaaaaattaatcactatttttatgaataaaagacttttttttgaattgtaaaattttattttccacacgtcaacattcttattaacacagcttgattgaaaaaattctgaccataagcatgttgattatttccctttggaactggtgaaatcagaaaaataaaatatttattttgcatatatagcatcaaaactattcactcaatgtggccttctgtgtgtatattaaaaggctttcttctggccgggcgcggtggctcacgcctgtaatcctagcactttgggaggctgaggcggggggatcacctgaggtcgggagtttgagaccagccttactaacatggagaaatcctgtctctactaaaaatacaaaattagccgggcgtggtggcacatgcctgtaatcccagctactcgaggaggctgaggcaggagaattgcttgaacccgggaggaagacggagtatttattaaaaagagagaaaagggattgattacagatgttagttgcagatataacttattgtgattggaactaaatgttaccaaaaaatttaggttgtatgtgaaattcttcgataaattttatggacttcaataggtcacagaaaatcttactgtgctcttctttcttttacaacacaaagttggccgggcgcggtggttcacgcctgtaatcccagcacttcggaaggctgaggtgggtggatcactgtcattatttctagctgacataaggtaacaatttacaagctgtggctgtagaaactggaaatctcctggttgactctgctttacttcttgccttcctattttagagaaacaaagcaccacaagaaaggccagaaaggacacaccttgattgcaaacacactggcgtctttctagggagaatatatgggtgacaatattaatttgaaatttatggcatcttttgtagaagtacggacatctatatggcaaataataaatacaagtaaaaatttaacactgcgatagaatcaggaaagtttgccaaaaataccttgtgatcaattattcctttattcactagtatggttgtgatggaatggttgcagcagtgtggtcttaaatagccaacactctctttcatcatccttgcgctatggccattttttttttttttttttttttttgagacggagtctcactctgttgcccaggctgaagtgcactggcatgatctcagctcactgcaacttctgcctcctgggttcaagcgattctcctgcctcagcctcctgagtagctgggactacaggtgtgggccaccacgcccagctaacttttatctttttagtagagacagggtttcaccatgttggccaggatggtctccatctcttgacgtcatgatctgcccgcctcggccttccaaagtgctagaattacaggcataagccactgcacccggccgcttttttcttcagaaaaatactttattttcctaattcagaaatttaacgtaattttcagtctcacattttcaaaaatggtttattctaaaagaagtatgattaaacaattcagcatttttttccaaaaaaaaaaagagtaaaaagttaactttatagtctagtgtagttactaagtaaaaaacaaagatgtagagtcatttattttagctgcacacttggaaataaaacacttctttgcctataggctgagagctttcaaagatgctagcttacagaatgtgggaagacctagtattaaaacattcactcctatgctcaaagggaacataattttgtgtcttctttgactcctaattccaactattaacccagatctatagaaatgtaacatttcattatagcacaaaatattttattatttttatttcagattcaagagatataggtgaagatgtgtaacacaggtatactacatgatgttaaggtttgggcacttgataactccattgccccagtagtgtacatcatacttgataggtagtttttcaatgtttctctcctttccttttttatttttagaactctgcgttgattgttttcatctatgtttccatgttaacccaatgtttagcacccactcataagtgagaacatgtggtatataacatacttatacacaatgcaatactatccagccacagaaaaagaaatagtgtttttttgcagcaacatgaatgcatcagaagtaatgttctttgcagcaatatggatgttaattttctcattataagcaaattaaaaaagaaaatgaatctaaaggccgggcgtggtagctcacgcctgtaatcccaacactttgggagaccgaggtgggcggatcacgaggtcaagagatcgagaccatcctggccaacatggtgaaaccccatctctactaaaaatacaaaaattagctgggcgtggtggtgcatgcctgtagtcccagatacttgggaggctgaggaaggagaatcgcttgaacatgggaggtggaggttgcagtgagctgagatcgcgccactgcactccagcctggtgacagagggagactccatctcaaaaaaaaaagaaagaaagaaaagaaaaagaaaagaaaaaggacaccacatattctcactcataggtgggaattgaacaatgagaacacatggacacaggaaggggaacatcacactctggggactgttgtggggtggggggaggggggaggtatagcattgggagatatacctaatgctagatgatgggttagcgggtgcagcacaccagcatggcacatgtatacgtatgtaactaacctgcacattgtgcacatgtaccctaaaacttaaagtataataataataaattaaaaaaaaaagaaaagaaaaaggaaattaatctaaaattcattagtacctggttaaattgtagatctttgctatggtgaatagtgctgcagtaaacatttcagtgcaagtcttttttctaaaattattttcccttttgggtatatactcagtaattgggttgatgggctaaatggcaattctattttaagttctttgaaaaatcttcaaactgtgttccatagaggctgaattaatttgcatttccatcaacagtgtagaaagacgccctttttttccacaacttgaatatttgtcactttttggcttttaataagtcattctaactagcatgagatagtatcacattgttattttgacttacatttctctgatgactagggacgttgagcatttttctttgtatgtttattggcagcttttatgtctttctttgagtaatggcttttcatattatgtgtctttttttataaaatttctgatagattctatatattaatactttgttgtatgtagtttgcaaatattttattttatactacaggttgtctaatttgtcaatagtttcttttgctatgcagctatttagtttaattaggtgcgaatttccaagttttttccattgaatttacttttaaggtgttatgaattatttccagagggcagtgtctagaagagtactttctaattggtcttctagaatttttatatattaaagtctcacagttattaatctatcttgttttatatatgagaggtagggtttcagttttcttcttttgcatatgactaaccagttttcccaatactatttattagataggtagttatttcctttttatttctattaactttgtcaaaaataagttgggggaaggagtggtggctcctgcctgtaatcccagcacttcagggaccaaggtgagcagatcacttgagttcaagtgtttgagaccagcctggccaacatggtgaaaccccacctctactgaaaatacaaaagttggccaggcgtggtggtgcatatctgtaatcacagctactcgggaggctgaggcatgagaattgcttgaactcaggagtcagaggttgcagtgatctgggattgttccacagcactccctcaaaaaaaaaaaaaaaaaggttcgttgtgtacgagtgtagctttatttcagggctctctctctgttccattggtccatatgtatatttttgtaccagaaccatgtcatattggttactgtagcttctggtaaagtttgaagtcaggtaatgtgaggcatccaggtttgttaacgttgccttggctatttaggcttgtttttctacacattttagaagattttttttaattctataaaaatggcattaagggtttgatagaaatagcacttaatttgtaggtggttttaggcagcacaaacatttaaattatattgattcttcaaatccatgagcataaaatgcttttccatttacttgtgttttctgatttctttcagcagtgtattgttgtactccttgtagagagattttacatccttgattcaatgtatatatattttttgtttgtggctatcataaactgtgttcttgattttgttctcagcttgaatgttattagtgtaaaaaatgctactcatttttgtatgttgattttgtatcatgagacattgctgaagtcattttttaggcttacgagtcttttggttaaatatttaaagtttcccaggtagagaattatatcttctgtgaagataatttgacttcctatttttctctttagatgccttttatttatttgtttgattgcactggctaggacttccagaactatgttgaataggagtgtgagtgttgagtgaatattgttatttttatggagaatgcatctagctttcatctgttaagtatgatgttaaatgaagatttgtcatggatgactcattattttgaggtgtttcttcaatgtctagtttgttgagaatatttttatgaatattgaattttcttgaatgctttttctgcatgttttgataattacataatttttgcttttaatcattttacaaggtgaatttcacttattgactgcatatcataaaacattcttgcattcataaagcccgcatgattgtggaaaataactttttgatttgcttgtgaactcagcttgctagtgtttcatggaagatgtttcaatgttcatgaagaatatttgcctatagtttttttgtgtcttcactagattttggtattaggatgatacttgtttcatataatgaattaggaataaattccactttgattttttatatacattcagtagaattagtaccagttcatcctttttttttttttttgacggagtcttgctctgttgcccaggctggagtgtagtggtgcgatctcagctcactgcaacctatccgtaccgggctcaagcaattctcctgtctcagcctcctgggtagctgggactacaggcacccactaccaacacacttgactaatttttgtatttttagtagagacagggtttcaccatattggccagggtggtcttgaactcctgcccttgtgatccgcccacctcagcctcccagagtgttgagattaacaagcgtgagccaccgtgcccggcctagttcatttttttttgtttgtttgaggcagagtctcgctttgtcgcccaggctggagtgcagtggcatgcatgatcttggctcactgcaacctccacctcctgtgttaaagtgattctcctacctcagcctcccgagtagctgggattacaggcacacgccaccatgcccagttaatttttgtatttttgataaagacagggtttcaccatgttgcccaggctggtctcgaactcctgacctcaggtgatccacacccttcggtctcccaaagtgctgggattacaggcatgagccaccatgcccggcccatcttttttatatgtggtaaaatttggctgtgaatttatctgattcagggctatttatgtttttttattactaattcaatttcattatacatttttgctctgttctagatttttgtttcttcatggctcaattttggaagattgtgtgtatccagtttattttctctaaattttttagtttccatgcatagagatgtccatagtagtctctgaggatgttttatatttatgtgggattagctttcacatgtttaacatttaaatacatgcagaataaaagttggacaaaagtcatattccctcatgataaatatgtgaataaattaggtatagggcaaatgcaccttaagccaataaatgccacatataacaaaaattgcacagctaacaacatagtagatggagaaatgttgtgagcttttactctaagagctagaataacacaaggatgcacactttcttcagtcttactaaacagagtactaaatgttcatggcagagaaattagaaaataaaatcaaaggcatccatattggaaaaaaattaaattattgctgcttgcagatgacatcttaagtatagaaaagcctaagactttactgagaaccactagaataaacaaatttattaaactggcagaatataaaatcaacatacaaaattagtagcatttctatacactaatgattaactatctgaaaatgaaattaaaaaccaatcccatctacaataactgtagttactagactttgaattaaatttaactaaaaagttgaaacatgttacattataggataaagaaccttaaagaaattaaataatacacaaatgaaaaaattacacatatttgcaaaaaactatcaaagtaccagtgacacactaaatagaaaattttaaatatatatctaaaattttatatatatatatatctaaaatttatatggtaccacaaaatacctgaatagccaaaacaaccaagaaaaaaaagactgaaattatcacccaaactgacttagaaatatactacaaagctatagtaatcaaaatggtatggtacttgaataaaaataaacacatacacaaatgaagcagaaaagagcagaaacatattcatgtatttatagctaaatgattttagaaataggtgacagtttcttagggaaaggacagtatcttcagtaaatggtgttgagaaaactatatagccacatgaagagcaataaaacaagatctgcatatcacatcatatatataaatcaactcaaaataaattagatacttaactgtaaggttgaaactggaattactacaaaaaaatatagggtgaaagccctataacattgatctggacagtgacttttttgttgtaatctcaaaaccccaggaaaataagggaaaaacagataagtcatattacttcaaattaaaaagttgctgcacacaattctcatacaattaacaggattagacaactgaagaatcagagaaaatataggcaaatcatacatgagacaagcgttttgttgtatactaaaattactacaccaaaaaaaaacttaaaaatgagcaaaaggtttgaatatttttcaagacatacatattgccaagctataaataaaaaatgctcaatatcaattatcagaaaaggaaagcaaaaaaaattactatgagatatcaactcactcctgttagtatgactcttattaaaaagtgttagtaaagctgtgcagaaaagggaatgcttgcacactgttgggtgaatataaatgggacagccattatgaaaaacaaaatagagatatctcaaaaaatttaaaatcaaactatcaaatgcagaaagtgcaatattggatacatatccaaaacaaaatcggaatgaagaaacatttgcaactctatgttgttcgcaacactcttcacaatggccaaaacataaaatcagtggttcaacatctaattagcatataaagacaatgtggtgtatatacacaacaaaatactattcatctttaaaaaagaaaatgtagttttcaattacatgattaatctggaggacattagttgaagtaaggcatagatattattactttataatttcacttaaagatggattctaaaaaacttaatctcattgaagtagagagtaacatagtgaccaccagatgccaaggtattcagaaagtgaagcttgaaaataaatctgtcaaacaatacataattatagttgggcaggagaaataagttcaaacaatatgttctacagcatagtgactatagttcataataatgtatttgcatttttttaaaaaattaagacaatatcatgtgctctcaccacaaagagttaactatgtgaagcattacctaaaattgagcatttgacaatgtacatagacttcaaaatgtaatgttttacaaaataaatacacatttatttattacagatgataatggtatgaaagacactaaaagggcaggtgttcgggctgggcacagtggctcacgcctgtaatcccagcactttgggaggctgacgtgggcaaatcatgaggtcaagagattgagaccatcctggccaacatggtgaaatcccgcctctactaaaaagacaaaaaacttagctgggtgtggtggtacatgcctatagtcccagccacttgggaggctgaggcaggagaattacttgaactagggaggtggaggttgcagcgagccgagatcgtgccactgcactccagcctggtgatagagcaagactccgtctcaaaaaaaaacaaaacaaaaaaacttacattgataagcaaactctccagttaaaatcaatttttctttctttttttgagacagtctcgccttgtcacctaggctggagtgcaatggtgcaatctcggctcactgctacctctgcctcctgggttcaagcaattcttctgcctcagcctccggagtagctgggattacaggtgcatgccaccccacctggctattttgtatctttagtagagacagggtttcaccatattggctaggctggtctcaaactcctgacctcatgatctgcccgcctcggcctcccaacgtgctgggattacaggtgtgagccatcgcacttgaccaaaaaacaatttttcaagtgcattaaaaataccaactttctcatcaaaacctacaaagtagcatgtgaaatgacatggcattacaaaagtgagaaaattgtagctataaaacagaaaaaaagaagtgctgtgatgtcatgcaaagttggaaaacacgtaagacaaacctgaagataaatggaaaataaaacaagcagaattttgctttatattcagcaagattcaggtttgctgcctaaaaaaagatcctatccacataaagaatcaatgttttttctttgtcatttatattttacatctctgacttaaagttacaaaataactctagcaggaatatttacagattataaaacatctgttactcggcaagcactgtcacgtttttttgctacatttatatattaaaacatcctcatgacttatgaagcctccttagtacttacctgaatgttatgggaagtcagggaccctgaacagagggaccggctggagccgtgggagaggaacataaattgttaagatttcatcttaatatggacatttatcagttctcaaataatacttttgtaatttcttatgccggtctttaatctcttaatcctgttatcttcataaactgaggatgtacatcacctcaggaccactgtgataattaactgtacagattgattgtaaaacgtgtgcttgaaaaatatgaaatcagtgcaccttgaaaaagaacagaatagcgacttttatggaacaagggaagacaaccataaggtctgactgcctgcggggtcgggcaaagagccatatttttctttttgcagagggcctataaatggacgtgcaagtaggaaatatatcaccaaattcttttcctagcaagtaatattaatactctgggaaaagaatgcattcctgggggaggtctataaatggctgctctgggaatgtctgtcttgtacagttcagataaggactgagataagccatggtctcctgcagaaccctcaggcttactagggttgggaaaactcaaccctggtaaatttgtggtcagactggttctctgctctccaaccgttttcagttgtttatcaagacaatacatgtactactgaacatacacccttatcagtggttctgcttttgccctttgccctgtgatctttgttggacccttatcagaggttctgcttttgccctttgatctttgttggagccttattagtggttctgcgtttgccctttgccctgttccctcagaaacgtgatctttgttagacccttatcagtggttctgctttttgctctttgaagcatgtgatctttgtacctactctctgttcttacaccccctccccttttgaaacccttaataaaaacttgctggtctgagactcaggcgggcatcatggtcctactgataggtgatgtcacccctggcagcccagctgtaaaattcctttctctgtgttatctctatttctcagccggctgacacttatggaaaatagaaagaacctacattgaaatattgggggcgggttcccccaatacctgaactggctcaatcaacaaataaatttacttctgtcaattataaaaagtgaaaggaataataacttaaataggcttatataaggttcttcaattagaagaacaaaatagaatgttttaattcaataaaacaatacactaattgtggaactacatctaaaaattattttgtgtgccctactaaattttataaaaatagtttatatctttgaccacttcacataatgaaaacctcataaactataaaagaaaaaaaattgtaagaaacaacaaaaaaatgtgggctaggcatgagtaccaatcaagtaaaaacaaaatttgcataagattttgaacccataagccatactattttacagtaattcagtagaaagagtatagatttgctttccgcatttttgaggtttatagttttctagtaaattagttaccttactaaaatgttttgttccaatattgctcttttcttctgaaaataggaacaaatttatactcacacaaacatgcttacttactccataattttcttacacctagggtttaacttaagagtaatgtatgtatatatttaactttactaagtcaaaactaacaagtctgtatgtgtttgcaggcagagaaacaacatgttcaaaaatacatataacaatttttttaatgcttatttaggactcagaatgtgtggactttatttatacttctatataatttttagcataaccataaaaatagccctgtagtcaataacaattgtacattaaaaaaaactaaaactgtagaattggtttataatacaaaggataaatgctggagatgatggatacttaatttttcctgatgtaattattacatattatatgtctgtatcaaaatgtgctatatatggcataaatatacacatacaatgtatccacaaaaattaaaaagtataaacttagatgagaaataaatatttaacctatgagaacattctttaacctccttgcagtttaaagtcactggcaaaagggattactagaaatgtttgtccattatgttaccaaatagtatgttaccatcttttgcctacaccagtgagtaaagtgaaataggttaaagttaatggcatactaactttattaaatgttttataaatgttaaataaaattttaataaaatattaagttcacacataacttaaaattttaagaacgtacattttattacataaaagtacaattagtaaaataatttactaattttaactaaaatttaaaatgcttttttctcactataatgcagaatattaccctgaacacccacctcatgtgtcacttatattaacaaaaagagcctctccacttagatttttatgtgtcttacattttaatgtccttacccttccataaaaaagatcataatgcccaactaataaaaaaaaattctcctatctctgatgcaacaattagtcacaagttgaatacaatagaaatgaagaaaacaagaagagttttgaattttgagagttgaattacattattcatgttgcaaataatctgtattttttaaggaaaaaagtatactttcaatgtaattataacttttcaaaaaattttctacaccttttaaagttatacacaatttatctaacaactttagttctggattattttttatactcagcattctgatttactgtaatgtctgaagtgtcagtgccttagatatttctgagctatctgatatttacatagacttaattttagaataaatattgttttatatttactgcatctacaaaaaaaaaaaaaaaaatatatatatatatatatatatatatatatatatagagagagagagagagagagagagagagagagagagagagagagagagagagagagagatggagtttcacacttgttgcccaggctagagtgcaatggcacgatcttgactcactgcaacctctgcccctccagttcaagcgattctcctgcctcagcctcctgagtagctggaattaaaggcactcaccaccatgccttgctaatttttgtatttttagtagagacagggtttcgctatgttgaccaggctggtctcgaacacctgacctcaggtgatccatccacctcggcctcccaatatgctgggattacaggtgtgagccactgcgcccagcctgcagaaatatattttagtactaactctctggtgttttctaaagctatagattttgaaaaaatgtgtttttctaaatgtattacatttgcagagtttttctcccatacagattcactgatgttgaaaaaactttgagcaactgcttcagggtttttctctagtacaaaatgtacatgataagctttatgataccagtaaatgtactacaaccctctttatgtttgtaatctttgtcttcaaaacgaatactcttcttcactttaaaggcttatattttcttaaagtctttagacagtaattgcatttataatgcttttattaagtaccaacattctgatattaagatgtcaacagatattaatggctattttacactctttatatttgtacaatttttcttaagtataaacgctttcctgtgcaataaggtttgagccttaattaacagtattgccaaattcttcacacttgtagttttctccagtatgaattatcttacatacaatgaagtgtgaaaaccatttaaagtctttgacacattctttacatttctagaatttttcaccagtatgatttcctttatatttagaaaaatttgaggtgttgtcaaaatcattatcacacattccagttctgtagtttctctccagtatgtatttttttatgtttagtaaggtttgcagattggttaaaagctttgtcacatctctcacatttatagggtttctctccagtatgaattatcttatgttcagtaagttttgaggatcggctaaaagctttgccacattcttcacatttgtagggtttctccccagtatgaattcttttatgtgtagtaagggatgaggagtgtttaaaagctttgccacattcttcacacttgtagggtatctctccagaatgaattttcttatgttcagtaagttttgaggattggataaaagctttgccacattcttcacatttgtagggtttctttccagtatgaagtttcttatgttcagtaagttttgaggatcggttaaaagctttgccacattcttcacatttgtagggtttctctccagtgtgaattctcttatgtgtagtaagggctgaggagtgtttaaaagctttgccacattctttacatttgtagggtttctcttcggtatgaattttcctatgttccgtaagatttgaggatcggttaaaagctttgccgcattcctcacatttgtagggttgctctccagtatgaatgtttttatgttcagtaagttttgaggatcggttaaaagcttttccacattcttcacatttgtagggtttttctccagtatgaattctcttatgtgtagtaagggttgaggattgggtaaaagccttgccacattcttcacatatgtagggttgctctccagtatgaatttttttatgtgtagtaagatttgagaactggttaaaggctttgccacattcttcacatttgtagggtttctctcctgtatgaattatcttatgtgtagtaaggtgtgaggactggttaaaggctttgccacattcttcacatttgtatggtttctctcgagcataatcttttttatattcagtaaggtttgagaattggttaaaagttctgtcacattcttgacatttgtagagtttctcacaagtataaattcttttatgtttagtaagctttgaagattggttaacagctttttcacattcttcacatttgcagaaattcaccttggtataatttctttcatgtcgagttaggtgtgaaagcatgcaaaatgatctgccacattctttacatttgaaaggtttattttccatatgttttatcttatgtctatctgaatgtgaaaatttattaaagactttcacatatttatcacattgaaacattttgctctgcatagttggtaaacattggttaagtccattataacctcccttgtgcaacttacattcatccacacttttacagccttttaactgaaaattatcatttccacatttttcatatcttctcagtgtcactttttcaaaagaatcttttatgttctgctctggccaaaactcttgggcaaaatgagaacacattactgaaagaaataaaaataacacattactttacagactcagataaatatactttccaaacctaacttataaaattacacaaactacataagcaagatggcaccacaggccataattaagtgtatgtgttgccccaggtgagcacaatgcaaagagccacatagaaaaaaaaaaaaaattctgtcacatttacccaacacagctttttctactccccaatataacataatgttttcagaagtaaattacagccaggtgcagtgactcacacctgtactcccagcactttaggaggctgaagcgggcggatcacgaggtcaggagttcaagaccagcctggccaacatagtgaacccgcatctctaataaaaatagaaaaaaaattagccaggcatggtggcgggagcctgtagtcccagctaattgggagactaaggcaggagaactgcttgaacctgggaggataaggttgcagtgggccaagatcgcaccattacactccagcctgggtgacaaagcaagactctgtctcaaaaaaaaaaaaaaagtaaattgcaaacttcaattatttacatatagaggaatacctgagagtagataatttataaagaaaaaaggtttatttggctcacagttcggcagactgtacaaaaagcatgtgccagcatctgcttctggtgagggtctcaggaagcttacaatcacagtgcaatgcacagattaactggacacatcacatggtaagatacaaagcaagtgtcaggtaaagaagccaggttttctttttttttaaatgaactagctcttacttgaattaacagagtgtaaacttactgattaacaagaagatagtgccaagccattcatgaggaactttccctcatgacctaagcacctcccactaggtcccatattcaccttctatcaggacccaaatcaacaatgatgattacattgcaatatgaggtttggagaacatagacatccaagccatatcacagaccaaataggcttaacagacctgtacaaaccttttcaatcaaaagcaagagaatacacaatatttttctttgcacctggtgtattctgttaggacacaaatcaagtcttattaaatttaagaatgctggctgggtgcatgcctataatctcaacactttggaagacccagctgggccagaaatttgacaccagcctgggcaacatagcgagaccctgttcctacaaataatcaaaaaaatagccaggcatggtagcagccatggcacgtctgtagtgccagctacttgggagactgaggtaaaaggatcacttgagcctgggaggttatggctgcagtggagccactgcactccagcctgagtgacacagtaaaatcttctaacagcaacaacaaataaatttaggaaaaccaaaattataaacattttctgaccaaaagtgaataaaacaaaaaattaaaaggaaaagtaaaattggcaaattgaaaaatatatgaaaataaaacagtgttcaacatattcttggctcaagggccaaaacacttaatttttcaaaaatgtcaatgcaaccaaaagtggtgaacaaattcaacataatctctataaaaaatgcattagcagtggctcatgcctataatcctagcactttgggaggctgaggtgggcagattacctgaggtcaggagtttgggaccagcctggccaacatggtgaaaccccttctctactaaaaacacaaaaattagctgggtgtggtggcatgtgcctgtagtcccagctacacaggaggctgaggcaggagaataacttgaacccaggatgcagaggttgcagtgagctgagatagtgccactgcactccagcctgggtgacaaaatgggactccatctcaaaaaaacaaaaaaggtatacacacacacacacacacacacacacacacacacacacaatggattattcagccttaaataaatctagtcaacattttaagataaactttgagaatattatatcacctgaagtaagccagtaacaaaatggatactatatgattccacttatgtgagatatcttaattagtcacactcatagaaagtgcaagggtgtttgtcaacggctggagagaggataaaatgggcagttgttaatgggtattgagttttagtttcacaagatgaaaaatttatagaagtcttttgcataacaatacaaatatactaaacatggctgaaatgtacagtttttttgagacaggttctcactctgtcattcaagtttgagtaaagtggcacaattatggctcactgtagcctcaaactgccaggctaaagtaatcctgcaccatcaatctcccaaaaagctgggaccacaggtgcacaccaccatgcctggctatttttaaaaattttttgtagacagagaatctccatacgtttcccaggctagtctcatacttttgggctcaagcaattctcctgccttggcctcccaaaatcctgggatcaaagatgtgagccactaccatgcctggccctgaaatacacacttcaatagattttagatggtaaaatttatgtggttttacaattaaattttttaaaagaaaaaatggaaaaaatacagaattataaatctttacatgaattaccttcaaatcacaaaagtgtttctctcacacaaaagaaatatatatttattattaaacacatggtgaaaataagactatctcaccgggtgtggtggctcaccccttgtaatcccagtactttgggaggccaaggcaggtggatcacctgaggtcgggagttggagaccagcctgaccacatggagaaacctcgtctctactaaaaatacaaaaaattagctgggcgtggtggcgcatgcctgtaatcccagctgcttgggaggctgaagcaggagaatcacttcaacctgggaggcagaggttgcagtgggcggagatcacaccactgcactccagcctgggcaacaagagtaaaactccatctcaaaagaacaaaaaagactatctccatgactaatcacttagacaagataaaacaatcattgaaaatcagctaagaaagaatacatacaagataagccataaccaaaattggggtcatattcatagataaacacacatatgtaatctgattgggatagatatgtggctgatttatttcttaattaaatcccacaaagtgtacaaacaattgcaaattgtctaaaatggtaaaacaaaaaaacaataaacagatgtcaaactgaaaaaacacattaatatggaatggcaaaaccatagtaagagaaacgtttactcataaaatcttgcaggcaacactgatgtaccattaaaaatgatgtgtctaggccagatgcagtggctcacgtctgtaatcccagcacattaggaggtgaggctggcagatcacaagttcaggggtttgagaccagactcggcaacacggtgaaaccctgtctctactaaaaatgcaaaaaaattagccaggtgtggtggcgcacacctgtaatcctagatactcaggaggtggagacaggagaattgctttaacccagtaggcagaggttggagtgagtcaagattgcaccattgcactccagcctgggaaacaggagcaaaactccatctcaaaattaaaaaaaaaaaaaacaaaaaacaaagacaattttgggccaggctctgtggctcacacctgtaccagaactttgggaggccaaggaagatggatcacgaggtcaggagttcaagaccagcttggccaacatggtgaaaccccatctctactaaaagtacaaaaattagtcaggcatggtggcatgtgcctatagtcccagctactcaggaggctgagacaggagaatcacttgaacctgggaggtggaggttgcagtaagcagagattgtaccactgaacttcaggctggacgacagggcgagactctgtctcaaaaaaaagacagaaattttacgtcttaaatatatgctattgttacacaaaacaaaactgctgtaatccaactttagaagcaaaaaaatagccttacattgctatatatatatctatagatatctatagagatatagatctatatctctatagatatatagatatatctatatagatatagaaatagatctatagatatctatagatatagatctatagatatctatagatagatatagatctatagataccgatctatagatatagatctctagagatctatagatagatatagatctagagatagagatcgagatctatatatataaaatgttaaatatataaaaatatatatattgcagaatatggttagagcgcctgatatataaaacaaatatctgcgaataaattatattatttagatacaggctggacaaaatgggtgcaaatcatagaattattttttcctacatcaagcctaaatttataagtaacagttttagtaaatatggagtgcctacaaattatctaatttactttagacattacatgtaaattctagcatattgttctaaatttctaaatctaaaattacagacaaaattgaaacagaaaatggagaataaaaatgtatagcaggagtgaaattggtaagatgggagaataaaaggtgccctattttgttatctcctgcacagcaagacaatttgtcagccatccctgacaaaaatgcctttatgagattgccaggcatcatggctcacacctgtaatgaaagatacatgatatattaagtttagagaattgcttcaggttaggatttcaaaatcagcctgaattatgtatgtagcaagactccatctcaaaataagtgcctttgagagctttgagatccagagagagagggagttgtggaactctgataaagcccaagatttaaaagtcttcttttcagaaggcaggccctcattcaggtgcaaactacaggatccctgttcttaactacagactaggaaatggcccacccaacttggtcccactaagaattctgaacttactatgtaaccatcccaaactcctcacagccaaagtctgggagagattctgcttttccagaggcccagaggaaggtacccatttacagccatgtggactggcctaaggtaaaggaccttagtctttactgtggtccttgaagcagttcaatgactcagttccagctcgctgagccacagtttatggtcagttctgcctatacagaaacccacacagtgacctggaaagatcctttctggtactcgctgaaagccatagtcattcatattttgatataaggcccaccatatgcagaccctactgcaaaaacctgccctagtgtctgccctacagagcaaaatcctctgccaaaattcagtctgtccaaaatgggaatttaaactacccaagttttttaggacaagccaactaaaggcagaccctagtgcagacccagcagccttgtgacaaagctacaaccccctctccactacaaacccagagggcatcccatcaccctgagcgtccaacaaaagatctttaccttctgaaaccagtttataaaaacttgaggtgttttctccttctgtacacagatgccaatgcaaaactatattgtgcccattgtcaatgctgctagtttaacataacactgaaagtattggcagaagaattagtcgaaaaatgaaaaagagcaattgaaattgaagacacataagtaaaaagttgctggctgtagctcatatgatcatatatataaacataaacagtacattaaaacttgtaaatacactcagtaaatcagaaaaatataaaactaacatacaagttagggttccataaacttaaactctctgataaaatagagaaaaaaacttatttacaatagcattaaaataataaatttctgagaacaaatttaaccaaggaggtacaaaatctttacagtgagagatatcagtgaaagatattagaaaagacataaataaacttgaaaatattttatgtctatgaactgaaagaataaatactgtgccatgttatccaaaatgatctatagattcaagactccctatcaaaattccagtggcatttgtttttcacagtaataaaaaatataattctaaaatttaaatgaaactatgatacactttaaatagccgaagcaagcttgagaaaaaagaacaaagtagaagaatatcatactttgtaattttcttttttttttttttttgagacggagtcccactctatagccaggctggagtgcagtggcacaaacttggctcactgtaacctccacctcccgggttcaagcgattctcctgcctcagcctcctgagtagctgggattacagatgtgtgccaccacacctggctaattttttgtatttttagtagacaccgggtttcaccatgttagccaggtttccaaactgctgaatcaaaagaaagatttatctctgtgagatgaatgcacacatcacaaagcagtttctcagaaagcttctttctagtttttatctgacctcctgatccgcccacctcagcctcccaaagtgctgggattacaggcgtgagccaccgtgcctggcccttgagccgatgcccagccctttataatttcaagactacattagaagactatagaaatacaaacaagtaaaatgtgtagaaaaatgaaaaaaaaaaagggcggggaatagtggctcacacctgtaatcccagcactttgagaagccaaggtaagcaaatgacctgagggcaggagtttgagaccagcctggccaacatggtgaaaccccatctctactaaaaacacaaaattagccgggtgtggtggcacgtgcttgtaatcccagctatttgggaggctgagacaggagaactacttaaacccaagaggcaaaagttacagtgagtccagactgtagcactgcaccccagcctgggctacagagcaagactctgtctcaaaaaaaaagaaggaaagaaaacaatagaaaagaaaccacttctcatacgtttcagacaagatggaaaaaaagaacttaaaaaatcatttaacagtttctcaaaattatgtaggtatttctgtgcctccaaaaaaaatgagtaaggattcagattgcacagtctcttgtatgccatgaagcggacactggttctcaccgaaaacttaaaggaaaattaccaaaaatgtaaacagaaaccttagagaatttaaaagcataagacagaaaatgctcaaatgtgagagcataaaatactcaggctttccagaaattatttcctttaaaacacggcttcccaaatcacattttaaggactggctttctctttgacctttggacctctcatcagtgtcacctgttgtattcactttcattctcacttacctgggggttcattcaccatctcatgtctcttcacagtcaaaggctctttttcttgctccagacaggtgatcaggtcttgcttagagacagcaatacctgttttattaaaaaataaataacattaattttgctcatattctccaattaccaacctagtaatgtgctcagtaaagagaatgtaatggaatagtctagtaaattaatcccaaaatactgacttataacagaaatttttaaatacttagaaaatattctaaatttgtaggttcttaatttcactacccagtactactgaatcaaaacttggtgttggcaattagattttaaggtgtgggcaacaatattttatgccactaaacttctgaaattaccactagagtgaaggacacagatcagctcaggaatgtgttaagttcagatcaagatgaaacatactaaagaaattcttctctatacagacaaatccttaagattttctcaaaaacagggatctgaaactcatttatgcaaagcatacattaccaaaatatattctacaaagaagagaaatgaaacctttacggtatattagaaactgtctgttgggacaggcatggtggctcacaccagtaatcccagcactttgggaggccgaggcgaatggctcatctgaggtcacgagttcgagaccagcctggacaacatggtgaaaccctgtctctaccaaaaatacaaaaaaaaattagctaggcatggtggctcacgcctgtagtcccagctacttggaaggctgaggcacgagaattgcttgaacccaggaggcggaggttgcagtgagccaagatcgcaccactgcactctagcctggtgacagagccagactccgtctcaaaagaaaaacaaaaaaaaaaagaaactgtgtgtttaagttatccttacccaggaagaccaggtttctgtagttctctaaaatcacatttttatataaattccgctgtgcagtgtccaggcattgccattcttccagagagaattctatggccacatccctaaatgtcaacagtccctgaaaaacacatacacacaaacatattcaccaggtagccaacagagattataatttgactcaaggtaaaatgagagactaaagagaacaggttctgatttataggagtgactgaaattatccaataaaatcatattttttacacagaaatatttcctaatgtgttctctaaccctgagaaaacagagtggcacaagagccacaacaccagtgtatatataataattttctaaataataacatatataataggtcaggcacagtggctcatgcctttaatcccagcactttgggaggccgaggcgggcagattacctgaggtcgggagttccaagacccacctgaccaacatggagaaacccaatctctactaaaaatacaaaattagccaggcgtggtggcgcatgcatgtaatcccagctactcaggaggctgaggcaggagaatcacgagaatggcttgaacctgggaggtggaggctgtggtgagtggagattgcagtgagctgagatcgtaccattgcactccagcgtgggcaacaagagtgagactccatctcaaaaaaatacataattaagggcataaacacaaacacgtagctttttgagtgcttcacaagcttctgtgtaataaatgctatcttgtttaaataatagctaattgagaacacagatggagcctcaacattagatgttctccatttttactaaggaccgcaggttttcccaatagaaatgttgagttatctacacctttgcatgttcaatagccacaggtaacatttttaatattgcagattataaaataatcgtgagaattctgcatggcatataagaagtcatgatgtagagaagcctctggtatatggaaaagaagtatttttcagagactcttgactatcataagagtttttataagtagttaaaacaaattcattagggagaaaaaacccaagtagagaagtcaaagtttgcaagtactaaacgcatggcattccaggaggcagagcggacacagctcttgatctgagacatgtttaactgaaaaaaagccattttttcctttctctgaaaattcttttcacatgcgattctctggacaaattacacctgcatctggagaatatgcctttaaaggtatcagcaccacatgtttacctggtaccaccacactcacaggcagaaggaccaagactcacagaaaaagtccacccatttctgtccttcataccagaagcgattcaggaaccatgagctgctccacggagataaaagtaaaagttccttttcttctgtcctcaggtgtcctcccctgccatggacatcagcaatttctgctacagcaatgaaaatacggaccacactttcctgtcactaccaaaccaaacagaaccagccctttgaccattctttagagcaaaggtagaactctcatgaatatatcttgaacccctcatacttgattttggcctcatgttagagtcacaagaggcacttaattaaaacaacatgggcgggaacagtggctcacacctgtaatcgcagcactttgggaggccaaagtgggcagatcactcgaggccaggaatttgagaacaacctggccaacatggcaaaaccccatctctactaaaaatacacaaattagccaggcataatggtacgtgcctgtaatctcagctacttggaaggcagaggcaggagaatcgtttaaacctggcaggcgaatgttgcagtaacctcaggtcgcaccactgtactccagcctgagcaacggagtgagactccgtctcaaaaacaaaaaacaaaacatgatacctccgcccagaagaataaacagacctgtggatagggcacaagtagatatttctgcaaactggccatgtaatcttaattagaaacctgggctgggcatggtggctcacacctgttatctcagcactttgggaggccaagacggggggatcacttgaggtcaggagttcctgaccagcctggccaacatggtgaaaccccatctctactaaaaatacaaaaattagccagccgaggtggcacttgcttataatcccagctactcaggaggctgaggcaggagaatcgcttaaacccaggaggtggaggttgcagtgagctgaaatcgcaccactgcactccagcctgggcacagagcaagaccccacctcaaaaaaaaaaatcaaacctgggctgaaaaccacttagctgggcattgcctttaaagctttaatgggcttaaaaaatacttggaaactgtggctccactctctgtgatgtaattctgcagacttagggttcatgagtggtttttttgttctttgggtttttgtgtgtgtgtgtgatggagtgtcgctctgtagcgcaggctggagtgcagtggcgtgatctcgactcactgcaacctccgccccctgggttcaagcgattctcctgcctcagccttgagtagctgggataacacaggcgcctgccaccacaagcagctaattttttgtgtattttaagtagaggcagggtttcaccatgtcggtcaggctggtctcaaactccagacctctagtgattcgcccaacttggcctcccaaagtgctgggattaaaggcatgagccatggcagccagccattaatgggtattttaaacccattaatgttccctatcaattgcttttctggggctcatgattagcattagagaaagcaggcacagcatggagtcccttacactcagcactcttgttacaacacaaatacttctcaaatgaagactaccaattttcatattctttgctggctctttaaagtttacagaataaacagaaggcagcaacatctaaataagtctgcatgtggaaaccatgaggtacacatgtactaatgaggcaagagaatagggtctggaggcagggaacctaagaccatttcacaccgaattcctagacctaaatggaaaggaaaactaactttccatgcctaagtaacaaaaagaccagaggctactgcctttgcaaatccccaccttttctgtgaggcagataggaaattggctgtccacaaccattcagactgattgtgggctgagtctctatttgaataaaagtgacactttgtaacttcaccttagcctctaattggttgcttttgcaatcaattggatatttgcagaggattgtgacctttttaactttgcttcagcatctgattggtttcttcctgcaactaatcagagcaattgtgggccaccacttcatttacatgaggtgagcaccaagtggccaatgggaaacctctaggggatatctgaacccaagaaaattctgttgtctgggaccttaagccattgttcgggcccactttcacactgcagagtgtaatttcattttcaataaacccgttttgttcctttgttgcttcattcttttcttgctttgctgtttcatccaattctttgttcaaaaggccaagaatctggacaacttgcagtcaagaccctctactggtaacttattttggtgagccaggcaggagaggaggtaggcccaaagtattggatttaattttttcctttctccttttacatacagggaagtctttctctctttttctctttctctctctttctctctctctcctcccctccccccaacccagggccactttttgatgaaactgaaaggtttccacgtgcaagtgcctgactaccacctcacagtttgggtgagggacctgagacctttcgtctgtttgtttttctgagtcctattgtttttgtcctttttctgagactgtgtccggaattggtgggttcttggtctcactgacttcaacaatgaagccgcggaccctcgtggtgagtgttacagctcttaaggtggcgcgtctggagtttgttccttctgatgttcagatgtgttcggagtttcttccttctggtgggttcgtggtctcgctggctcaggagtgaagctgcagaccttcgcggtgagtgttacagctcttaaggcagtgcatctggagttgtttgttcctcccggtgggctcgtggtgtcactggcttcaggagtgaagctgcagatcttcatggtgagtgttacagctcataaaagcagtgtggacccaaagagtgagcagtagcaagatttattgcaaagagctaaagaacaaagcttccacactgtggaaggggaccccagcgggttgccactgctggctccggcagcctgcttttattgtcttacctggccccacccacatcctgctgattggtagagccgagtggtctgctttgacagggcgctgattggtgcctttacaatccctgagctagacacaaaggttctccacgtccccagcagattagttacatacagagtatcgacacaaaggttctccaaggccccaccagagtagctagatagagtgtcgattggtgcactcacaaaccctgagctagacataaatgttctccaaggccccaccagagcagctagatacagagtgtcaattggtgcactcacaaaccttgagctaaacacacggtgctgattggagtgtttacaaaccttgagctagatacagagtgccgactggtgtgtttacaatccctgagctagacataaaggttctccaaggccccaccagagcagctagatacagtgtcaactggtgcactcacaaaccctgagctagacacagggtgctgattggtgtgtttacaaaccttgagctagatacagagtgccgactggtgtatttacaatccctgagctagacataaaggttctccaaggccccaccagagcagctagacacagagtgtcgactggtgcactcataaaccctgagctagacacagggtgctgattggtgtgtttacaatccctgagctagacataaaggttctccaaggccccaccagagcagctagatacagtgtcaactggtgcactcacaaaccctgaggagctagacacagggtgctgattggtgtttacaaaccttgagctagatacagagtgccgattggtgtatttacaatccctgagatagacacagggtgctccaaggccccaccaaagcagctagatacagagtgtcgattggtgcactcacaaaccctgagctagacacagggtgctccaaggccccaccaaagcagctagatacagagtgtcgattggtgcactcacaaaccctgagctagacacagggtgctgattggtgtgtttacaatccctgagctagacatactctccacgtacccaccagactcaggagcccagctggcttcacccagtggatcccgcaccggggctgcaggtggagctgcctgccagtcctgcgccatgcgctcacactcctcagcccttgggcggtcgatgggactgggcgccgtggagcagggagcggcatccgtcagggaggatagggctgcacaggaacccacggaggcgagggaagactcaggcatggcagactgcagtcccgaggcctgccccgcgggaaggcagctaaggcccggcgagaaatcgagcgcagcgccagtgggctggcactgctgggggacccagtacaccctccgcagccgctggcccgggtgctaagtccctcattgcccggggcgggcagggccggccgggggctccgagtgcgaggcccgccaagcccacgcccacccggaactccagctggcccgcaagcaccgcacgcagccccggttcccgctcgcgcctctccctccacaactccctacaagctgagggagtcggctccggccttggccagcccagaaaggggctcccacagtgcagcggtgggctgaagggctcctcaagtgccgccaaagtaggagcccaggcagaggaggcgccgagagcaagcgagagctgtgaggactgccagcacgctgtcacctctcaagaccttttccttttctcctttttcagtctttcagcagccattttctagtagatgttggtaattgagtggaactagccagagccactctgatgttctctgaaggccaatgagcaaacagggctgcctgtcctgcccagaagggggaaagattttctatcctttctggttatagtcccttatccctacatatgacaccgttggcagcgggcagttcgcccagggtgaatcacatgtttcaggtgacttaaaccttcttttcttttcttatgctaaattcttcccttcccccactcaactagctatgaacagaaaacccacctagctatgcaaaaaggttatataagtcagagggtccaagcatgttgcaggtggtctctgaggtgcacggtggtgggggggtggggggagcttatgaaaggaaatgtattattgctgaagttgagagagttaaagggttgctttaaatgggatagataaacctttaaaaaagctcatagtagtccgggcgtggtggctcatgcctgtaatcccagcactttgagatgctgaggcggacagatcataaggtcaggagttcgagacctgcctgaccaactaaaactacagaaaaattagtcttgcattgtggcacgcacctgtaatgccagctactcaggaggctgaggcaggagaatcgcttgaatccaggaggcagaggttgcagtgagccaagatcatgccactgcactccagcctggacaacagagcaagactctgtctcaaaaaaaaattaaaaaaaaaaaacaacacctcatagtaggtcatcagtggtggagggaaccattctaaagttgtgctggcacctatctaaggtcagagccatctgacagactaagtctggggcctaaagaggggatgttcccagagaccccagtctgggccaagaagttttccagggagatgccccaggaaaaatttgggtcacctaatgagccctctactttgcaaagtcctcttcttttttctagaccactatgagcaactcttaatctatttcacctgattccactgtggggaactctatttccaattctgattccctgcttggctatatcttccaccattagaatcaatttgaccctgacaatctaacaagaaaatgtataatatttttctgcaatactgtctggccctattatgagctgctcagttcagaacactgggcagtcaatggtagcattaattatgacgctatcctgcaatcaggcctattttgcaagaggcagggcaaatggtcagaaatctcctatgtacagcccttcatgaccctatatcaaaacctaacaatctgtgaaactcccagaacctaccccccaaaggaaagttctaaggcagaagtagatattatagataaccttttacagggccacctggttctcagggtgagtagcgaccatccttgccaagcgaccccttgccaagtgcttctgaggctaaaactcagaagcaaacaccggggaccctacaagttcccctcatactcaagggggaacactgtattgaactctctctccagccctgctacctcttagggtagcaggagctgagaggccagtcctagtgaaggtccccttctctatataactgatacgcaacaatgtaaggagaagctaggaagctattctgagaatcttgggaaatttgctgatgggtttcaaactttgatctctcatggagagatgttcaatttattctagcaacctgttgcatcccttcagaaaaagaacaaatcttttgacgccacccaccaggaagcggatggattattcacctgaaaccctcagggcaaacactcaggaccagaaacagttcccactactgatcctcattgaaactacaacaccactgtaggaaacaaccaggctaaatttcttgaggctctccttggaggaatgagaaagggaataactaaggcagaaaattatgataaagtacagaaggttacacaaagcaagaagaaaaatctagccatgttttatggcaggttggaggaagcctttaaaaaaatatactaatctagtcccttcctcttcctgaagggaaaatactaatggcaaagcattttattagccaatctgcccctgacattagacataagctccacaagctacagatagggccacagactaaccaaaaccagcttcttgatacaatgtttatggtgtataacaattgtgacctgaaggaaggaaaaaggaaacagagtgaagaaaaacggcaagtcaaaattatggcagccatcattggtgatgtcctgaatgcccgaagagcatctaaggaaaatctgaagggccataaagataaagccagcagagactcttgcttcaaatgcaagaaaagtgggcattgggcaaagggatatactaagcccctgccaggtccctgctgtcaatgcaaaggtaccagtcattacccctggagaactgactgcccctgtgccaccatggggttgggtcagaaaactctagcagtgcaaaaggaggaattagatgaagactgaaggggcctgggatcttcctcactgcccctgtctaggaacatcgtagcaaccacatcatgcccaattcagcggtttatctagttgctatagtctagactaaaagttcccggatgacagggaccatgactgctttatctatttatctaatggtcatatgaaatggaagcaattagtttatctgagtctccagacctcttccttgtttttcacctaagtaccaggaaactggagaaactctcatctgagtaccaaccaaagacatctcttgcatgggggtaggaacaaacacaggatgacttatttctcttgcactgagacagaagcagaattaaccactcatgtcagccttacacaattctgttctggacattttcaaatttctcaaggatgcctaggtgattgtgagagggttctcagtgcccctgagctggtggcccaatgataagctagggatgagagactcaggctaaatgaagaatggaactgtcctggtagagctccacaacttgaattgcatgtcctgattagttagctcttgggtttaaaaaaaaaaaaaaaaaaggacaagaatactctactccagttagttagctcttgggtttaaaaaaaaaaaaaaaaaaggacaagaatactctactccagtatcacattttatgggtaggtatagtttggtcatggcactggataccttgtaagtcttaatctcttactctgaagatgcttgtttacacttacagattctgtaatcagattctatttacacctggagcccctcacataactgtagaaagtcactgcacaagatctgagaagttcaaaaacccgcaccctcaaaaaggggttttaatatttccatgttgacatctcacaatgcagaaaatgtcccccgtatgttttctgtacattctcaatcgaaagcctaaccttgacttgtgaatcccagacagaggttagaccttatgtgcagattctacgtcagataaacctggctctgcattcctgtgtgtcacagaaagtggagtacaatcaaaggagaggtccactcacagaggctgctctagctcattctaaatgatatttctacctaaaagggaaaagttgaggcaacataaatataaatagacagttttgggaggaccaagcttgaggattataacatgaaagcaaagactcaagttgcttggaatttatattttgcttaccaccagttacaagtgtatttgtaaaggtaaaaagaggacagaggctgttctctctttgggctggtacaaacttgtttgtcagaaactcttacttacaggaataacattaattattgactggatgtacatcattaaggcttagagtgtccagtgtggcattattaatttaattcacagctactggtggcaatagcaaacagtttcaaggtatgaatacatatagttgaaagtggggagaaagacataattgtgctctcattttaatgtctcttcaagtttgacaactaaaaggacctgcatttcccagatataagttttttaatttccaaaatttcaagacctagattcagaatttggagctgcagatttaggttctggatggataagagtatcagcaggtgttacctgcacatttgtgagcatttcagtaacaggaggaagtggaaagtggagattctcatgtctatgtgtatactcaatgcacacctgttactctaattgggtttgtgggccccatggtctctaaatcagtttcaggtctgaagatacaagagtaattgaaagaggtaaaatggctgattgctgccctgtgaagttcgtagaaatctggcctagcccctccagaagtgactgtagaggactatcaataccaaataggagagacaattctgcctgcatatttaggcgacagcatgcacttggcagcaaatttgggagtgactggaagcctgagagggtaagcccactctagagtagatcctggttggcaccttatatgtttctatcatatctggtaattccagacagtgtttgggaaatatcattaaaataaaaattttctggttgggggcaaggggagggagagcattaggacatatatctaatgcatgtggggcttaaaattagatgacaggttgataggtggagcaagccaccatggtgcatgtatacctgtgtaacaaacctgcacgttctgcacatgtatcccagaacttaaagtataatttaaaaaataataataatagaagaaaaaattttatccggccccagagaaactccacaatgatagaacattaagaaaactgttggccgggaacagtggctcacgcctgtaatcccaacactttgggaggttgaggtgggtggatcacctgaggtcaggagttcgaaaccagcctgaccaacatggtgaaacactgtctctactaaaaatacaaaaatcagccgggcatggtggtgggcacctgtaattccacctactcaggaggctgaggcagaagaattgtttgaacccgggaggcagaggttgcagtgagccgagatcaagccattgcactccagcctaggcgaaaagagcaaaactctatctcacaaataaaataaaataaaacaaaaataaaaataaaatcctgagtcacaaagaatgccaaaaagtttatttacctgttaatatgatacacatttatttttaaaaagcagagaaaaatatctacatataacctaaatgcttaaagaagtgagagatgggcaggccacaggggctcaacgcctgtaatcccagcactttgggaggctgaggcaggcggatcacctgaggtcaggagttcaagaccagcctggccaacatggggaaaccacatctctactaaaagcacaaaaattagccgggcatggtggcgggcatctgtaatcccagctactcgggaggctgaggcaggagaatcacttgaacccaggagacggaggttgcagtgagcctggtcgacagaacgagactccgtctcaaaaaaaaaaaaggagagagataagcaaaatattctttattattttcaggtataaaaacagagccttttggttgggtgcagtggctcacacctgtaatcccaccactttgagaggccaaggtgggtggatcacttgaggtcaggagttcaagaccagcctgaccaacatggtgaaactctgtctctactaaaaatataaaaattattagctgggcatggtggcacatgcctgtaatcccagctacttgggaggctgaggcacgagaatcacttgaacccgggaggcagaggttgtagtgggccaagatcatgccagtgcactccagcctgggtgacagagcaagactccatctcaaaaaaaaaaaaaagagagagagagagccttttatttctaacttaaattttctcttacaacagccaggtctctggatatgttgaactcttcgacatcttaattttagtagacactggattcaggcatctaaggagtagcattgggcacacagtattcacttgaaagaatgtttatggggaaaaaagcagaagagaaaaaggtgctataaaaaatccatgggtccacataaataaagcaacttcttagagacctatgaagacagttggattcttacacaaaaatagtgggaggctacaatacaccacagacactagtaaacaaatcactgaggcagaaaaattaacaaagatattaggacctaaactcaacacttgaccaaatagtaataaaatatctatagaactctccatctaaaaacaacataatatacaatgttttcaccaccacagggcacatactctaaaactgaccacaaaatcagaaataaaacaatcctgagcaaattcaaaaatttcaaaattgtatcaacaacatactcagaccacagcttgataaaaatataattcaatacaaagaaaaccacttgaaaccagacaactacatgcaaattaacctcaatatgaatgacttttgggtaaataataaaattaaggcagaaatcaagttctttaaaataaatgagaacaaagacacaacataccagaatcactgcaacaaaactaaggcagtattaagagggaaatttatagcattaaatgctcacatcaaaaggtagaaatatctcaatttaataacctgacatcctaaataaaagaatgagagaagtgagagcaaatcaacccctaaggtagaagaaaacaacaaataactaaaatcatatctgaactgaagaatatttagatgatgtaaaaaactacaaaaaagactaaaaaattagaagtaaatgttttgaaaaaactcagtaagataaataaaccactagctagattaatgaaaaaaagagaagatccaaaaaaaaaaaaaacacaattagtaatgacaaatggacattatcactgatttggcaaaaatacaaacaaggatgaaagtctacaatgagcacttctatgcacagtaactaaataatctagaagaaatgaataaattcctggacaaatacctcctccctagactgaacaaaaaagaaattgaacccctgaataaaccaataaaaagctccaaaatcaaattaataataagtagcctaccaaccaaaaaaagcccaggaccagacggacttacagctgaattctaccagatgtacaaacaaaagttggtattatttttactaaaactattccaaataattgagaaaggacttctccccaagttattatataagaacagcatcattctgataccaaaacctggcaaagacaaaacaaacacacaaacaaaaaacttcaggccaatatttttaataaatattaacaaaaaatcatcaacaaaatactgaaaaaccaaatccagcagcacatcaaaaagttaatccaccattatcaagtaggatttatccctggaacacaaggttggttcaatatatacaaatcaataaatgtcatttatcacttaaacagaactacagacaaaaaccacaaaattaactcaatagatgcagaaaaagctttcagtaaaatttaacatccttcatgttataaccctcaacaaactaggcattgaaggtacatacttcaaaagagttatctacgacaaattcacagccaacatactgaatagatacaagttgcaaacattttttttcttgaaaactggcacaagacggccgggcgcggtggctcacgcctgtaatcccagcactttgggaggccgaggtgggtggatcacgaggtcaggagatggagaccatcctggctaacatggtgaaactccgtctctactaaaaatacaaaaaattagccacgcgtggtggcgggcgcctgtagtcccagctacttgggaggctgaggcaagagaatggcggcgttaacccgggaggtggagcttgcagtgagccgagattgcgccactgcatcccagcctgggcaacagtgcaagactgtctcagaaaaaaaaaaaaaagagaaaagaaaaaaaagaaaaagaaaactggcacaagacaagggtgccttctctcaccactcctattaaacatggaattttgaagtcctggctgagcaatcaggcaagccgaaacaataaaagcacccaaaaagaaagaggaactcaaactatcccgggtgcagatgacatgactctacatctaaaaaaaacctatagtctcagcagaaaagttctgtaagctgacaaacaacttcagcaaagtttcagaatacaaaataaacatacaaaattagtagcatctctgtacatcaaccatatccaaagcaaaggccaaattaataatacaatcctagctgggcacggtggctcacgcctgtaatcccagcactttgggaggccaagaggggcagatcacctgaggtcgggagttggagacaagcctggccaacatggggaaacctcatctctactaaaaatacaaaaattagccaggtgtggtggtgcatgcctgtaatcccagctactcaggaggctgaggcaggagaattgcttgaacccaggaggtggagattgcagtgagccaaaatcacaccacttgcactccagcctgggcaacagagtgagactccgtctcaaaaaaaaaaaaaaaaaaaaaatcccatttgcagttgccacaaaaacgaatatctagaaatacagctaactagggagatgaaagatctctaggacaagaattacaaaacacttcttaaagaagtcagagatggccggctacagtggctcacgcctgtaatcccagcactttgggaggccgaggcgggtggatcacctgaggtcgggagtttgagactagcctgaccaacatagagaaaccccatctctgcctaaaaatacaaaattagcacggggtggtggtgcatgcctgcaatcccagctactcgcgagtctgaggcagatgaatcacttgaaccccagaggcgggaggctgcagtgaaccaagatcgtgccattgcactccagcctgggcaacaagagtaaaactgtcttggggggaaaaaaagtcagagatgacgcaaacaaatggaaaatcattttgtgctcattgatagaaaagttcggtattaatatggccataccaccaaaagaaatttacagatatgttatttctatgaaactatcaaaaatattctttttttttttttttgacggagtttggttcttgtcgcctaggctggagtactgtggtgaggtcttggatcactgcaacctccacatcctgggttcaaggctgcctcagccacccaagtagccggattacaggcatatgccaccacaccaggctaattttttgtatttttattagagacagggtttcaccatgttggccaggctggtctcgaacccctgacctcgagtgctccacccacctcggcctcccaaagtgctgggattacaggtatgagccaccacacctggcctcaaaaatattcttaacttaaaaaaaaaaaaaattaaatacatatggaaccaaaaaagagctctaatagccaaggcacttttctaagcaaaaataacaaagctggaggcattacattacccaactttatcttacaaagctacagtaaccaaagcagcatggtactggaacaaaaacagactcagacaaatgcaacagaatagagagccaaaaaataatgccacgcacttaaaaccatctgatcttcaacaaagctgacaaagagaaatacaggaataatttcctatttaattttaaatgttatttaaatttttaatgtaaacatttaaatttctggccaggcgtggtggctcatgcctgtaatcccagcactttggaaggccgaggcgggtggatcacgaagtcaggagatcgagaccatcctggctaacacggtgaaaccccatctctactaaaaaatacaaaaaattagccgggcgtggtggcaggcacctgtagtcccagctacttgggaggctgaggcaggagaatggcatgaactcgggaggcggagcttgcagtgagccaagatcgtgccactgcactccagcctgggcgacagagcgagactccgtctcaaaaaaaaaaaaaaaaagagaacaaaaattaaatgtaaatatttaaataatcttattaaaaataatgccacacacttacaaccatacgatcttcaacaaaactgacaaagagaaatatgggaataatttcctatttaataaatggtgcagtaataactatttagcactatgtacaaggctaaccctggatcccttccttacaacatatacaaaaattaacaagataaattaaagacttaaatgtaaaacttagaattataaaaaactctggaagataacctaggaaatatcattccagacacaggaaccagcaaattttataatgaagataccaaaagcaattgcaacaaattgacaaatgggatctaactgaagagtttcttcatagaaaactattaacagagtaaagacaacctacagaataaaagaaaatatttgcaaactatgcttttgacaaaggtctaatatccagaatccataatgaacttaaataagtttacaagaaaaaaaaaaaaacctcattaaaaagtaggtggccaggcaccacaacctacttgctcatgcctgtaatcccagcactttgggatgcagaggcaggtggatcacctgagatcaggagtttgaaaccagtctggccaacatggtgaaaccctatctctactaaaaatacaaacttagccaggcgtggtggcaggtgcctgtaatcccagctacttgggaggctgaggcagaagaatcacttgaatcagggaggcagaggttgtggtgagccgagattgcaccactgcactccagcctgggcaacaagagcgagactccgtacccccccccaaaaaaaaacattaataaaaacaaaatatggccagacgcggtggctcacgcctgtaatcccagcactttgggaggcctaggcgggcagatcacgaggtcaagagatcgagaccatctggccaacatggtgaaaccctgtctctactaaaaatagaattagctgggtgtggtagcaggctcctgtaatcccaactactagggaggctgaggcaggtgactcgcttgaacctaggaggcggaggttgcagcgagctgacatctgcacaactgcactctagcctggggacaaagccagactccgtctcaaaaaaataaaaataaaataggtacataaacatcatggaacactgtgtggccataaaaagagaccaagatcatttcttttgcagcaacatgtacagagctagagaccactatccttagaaaactaatgcagaaacagaaaatcaaatgcatgttattatttataaataagaactggctgggggcagtggctcaggcctgtaatcccagcactttgggaggctgaggtgggtgaatcatgaggtcaggagtttgagaccagcctggccaacatggtgaaaccctgtctctactgaaaatacaaaaattagccaggtgtggtgggcgcctgtaaccctagctacttgggaggctgagacaggagattcgcctgaacctgggagatggaggtggcagttagctgagatcgtgccactgcactccagcctgggcaacaagagcaaaactccgtctcagaaaaatttaaaaaaataataataataagagctaaataataagaacacatggacacaaagagaggaacaacaaaaactgagacttagttgagggtggagagtagaaggacaaagagaatcagaaaaaaatacttgtttggtgccatgcttagtacctcagtgacaaaataatctgcacaccaaaccttcatgacacaattttacctataaaacaaacctgcagatgtacttatgaaccaaaaataaaagttaaaagtaaaaaatccatgggtggaggagagtgcaatgtaagtggaaggactggtttgtactacagatagtggcttaggtgaggctacactgatttatttttgtgcccatgaaggcagaagagattatgaacagttggtcaaaaccctaggatggtggagaaaacagattactgctgcagattcagtgtctgcaggtggggatattccaggagacatagtcattttttgggtttttcgcaagaagcactaggataaacaatgctgttgtgaattttctgagggtggtacctagtcctgggaggggtgtgggcacgtcaatgtctagtgggtgtgtttgtgagtgggtggaaatcttgtggtggtagctgtgggaaagtggggtttgttatcacagctcttgtcctttaagttttcagtcctccctcacccttggaggagacctgaaatcacaggacaacgagcttgtgtacaggagagcagagcctcccattccaggcacccagagttccattccaggccaggcctctgtgatatcttttttctggcaccaaatctgtagagtttactgaacaccaagcaatcctccaacactcattgtctaacgtttgaattctgacaccacccagagtcagcatagaccctgattcagagcacaatccacaacactgtctttactgcagatgccagtcacaaacttcatgggctgatctatgcttctgagccactgtttaataactggggactcccagaactttcctcaagttcagtaatataacagagctattcacagaactcagtgaaacactgtagttatctttaccagtttattataaaagatacaactcagaaaaagtcaaatggaagaaatacataggaccaggaaaaaaggtggggaaaaatgaagcacatagataatcctggtaaagagctatgattaataaaattctccatctttgtattctccaaaaatagtttttcaaaagaaataccctcttattatgacttagatggtgctctctcttttctcacctgttgtagagccagacatagactctgcatattttcttccttttcttaaaaaaatcagctaaatttgtcttcagtggtcaaaataaaatacttcttaatcaaacttctttttcccacagcaactaaactttgagctacactcagtctgagccaacatacaaccccattttatgttcaccctaagaatatgctaacttcagggtaaaacattttctgatctaaaacctgactttttcactctctattcaccattcttctgctattttctttctaatcttgttttctcccctctgtggaaaaaaagtctgcctgaactttgcaataatagttggtacttcctcctgttgcaatactcctttggaattaaaattttttttacataaatctataactttaattttacaaaatttagaaactgcctcaaaacaataatacttatcttcagtaagaccttcacagcactttttcattttaaccttaactgcacctgcctgtgcatccccagcttcccagggctctcaagcttctctcaggataaagccttcttccatggctggggtgagcaggctgacatatctgcagaaaaggctccccagaaagaactaactgggcctttaataacctccttttgcaggctcaatattagctttagatgggctcaagctttaattttcatgtctgagttattcacttggtgtctgaaactatgtgtttgaaaaatccagcaaaattactgaaacgcagtgttagtatataaaaagaaaattttaaggtgcttccatttcatacctctgtaagaaaaccaaaagtatctacacctttcaaacaattaaagtattattttattatttattttaaaagttatgtagtaggccgggcacggtggctcacacctgtaatcccagcactttgggaggccaaggccagcaggtcacctgaagtcaggagttcgagcctagcctggccaacatggtgaaaccccatctctactacaaatacaaaaattagccaggcgtggtggtgcgcatctgtaatcccagctactcgggtggctgaggcagaagaatcacttgaatctgggaggcggaaggttgcagtgagctgagatcatggcactgcactccagcctgggtaacagagcgagactcagtctcaaaaaaaaaaagaaagttatctagtaaacaattagtcatatgagaacacttctaggaggtaccaaatttcatctcataacacttagcattaaattcagaaatcaagatcataggatatagaacagatattcactgccacaaatttatggtgcaaaaagaggaactatgttttcatgaatctatgtaactcaccaattatctactacattttcttgtggaaaggtatttaatttttacagccaaaaaggaagagagattgtctcgctctgactcccaggctgcagtgcagtggtgcgatctcggctcactgcaacctccacctcctgggttcaagcgattctcctgcctcagcctcccaagtagctgggactacaggcacgtgccaccatgcccggctgatttttgtatttttagtagagatgaggtttcaccatattgaccagactggtcctgaactcgtgacctcgtgatctgcccacctcagtctttcaaaatgctgggataataggtgtgagccaccccacctggcccttattcttttccttagtaggattctaacagctaaaccttggaattctgtttgaaattacccagccataaacacaactgacaaattttctaaactcactctgggaaagaaaaaggtaaataaaaacttttaacaaatagaatatataattaaattttttttttctgaaacccaactcttacatgctctttgcacatattttcttccctttcaaatgctactaataaaatgcaatttacatttaaaaaaactaaagtcactgactgggcgtggtggctcacgcctgtaatcccagcactttgggaggctgaggagggcggatcacgaggtcaggagatcaagaccatcctggctaacacggtgaaaccccgtctctactaaaaatacaaaaaaattagctgggcgtggtggcgggcacctgtaatcccagctactcgggaggctgaggcaggagaatggcttgaacccgggaggcagagcttgcagtgaccccagatcatgtcactgcactccagcctgggcaacaaatcgagactccgtctcaaaaaaaaaaaaaaaaaaaaactaaagtcaaaataagtgcactaatcttttcaaggtgacaaactagggagtggcaatgctgattagaaaacagatgtgttggcccagggcagtggctcatgcctgtaattccagcactttgggaggccaagaggggcggatcacctgaggtcgggagtttgagacaagcctggccaacacgggaaaaccccgtttctactaaaaatacaaaattagctgggcatggtggtgcatgcctgtaatccctgctactcaggaggctgaggcaggagaatcgcttgaacctgggaggcggaggttgccatgagccgagatggcaccattgaactccagcctgggcaacaagagtgaaaccccatctcaaaaaaaaaagaaaacaggtgtgtctaattcatgtgtcaagtcaggtcaccaatcacttgagagattctcccaccccatcctgctcacttaagtgctcaatgaccaccctctcactgcactatgcctcagtgactgccccaagtgcattttactttgcaagtttttgcatcatttcactgaggtcacttttttttgtcttttgaaatgctattttttctttcacaaatcttagacaattcaggggacagaaattatctctgtgtttttccctcaataccagcatctgattggctgaccagcaatatgtctccaagaaatggaagctgggttgagtaaaggcaatcttcatgtctcaaaggcttagtttttctttttttgagatggagtttcactcttggtgcccaggctggaatccaatggtgcgatctcggctctcagcctccaaaatagctcggattacaggcagccaccaccacgcccagctaatttttttgtatttagtagagatggggtttcaccatgttagtcaggctggtcgcgaactcctgacctcaggtgatccaccgcctcagactcccaaagtgctgggattacaggtgtgcaccaccgtgcacgcaagggttagtttttcaaaggaagagcgcaggggagagtcctatcagtccaagggcattcatctgtttccattgagaggctacactccatacctcaggttgttttatgaaagaaaataacccagtagattatattcactagacactcgagcagacatagccatggtagatatattggtttattcacagaaactactgaagcccaggaccagaaaaaactgaaggtggctgaggccacatcacccataaagtttccaaagggaaaccttgacccaaaaatattctgatactatctctgtgcctagagaagatttttaaaaatgaggcgaaaagattttttacaatacagtatcagggaattgttcttctttttcttctcataaaaaatattttcaaacagaaaacgatttttttaagtgccattcaatgtcaaaaaatgcttagttaaaatacagtatctaaagtgtacaataaaagacaaatagttgataatgtgaattagaaaggggaagctggcatttgagaatgtgagaagaaactggaaatttagtattttactgcaagtcatagttagtctggaggaatgggatgaggggtaggcttgagacccagcttgagagaactgtgaaaaatgcaggggaaaatcagtctcctgtggagtgtgaaaataactaagtagcaggcaattagacggaggttactctagtccctgggttcctattttttaaaaactctaactcaaatgcatttttttgcaaattactgaattgagggaaacaaaaatttaggcttaaccaatcataaactgccaattaacctctgattacataaccaggaaatgtccaccttaattgtacaagtcaagtaactatgaactgtacctaaccaattatttaatttggttttcttcatcatgtacctttaaaagtctttccttcaagctgctctcataaagtcacaagctccaaaccacagctgaatgctccacaatttttgaatcactctttgattaaattctccaatatttttgtggtgatccccataatttatttatttatttaacttatttatttatatattttttaagacggagtttcggtcttgttaaccaggctggagtgcaatggcgtcatctcggctcactgcaaccgccacctcccgggttcaagcggttctcctgcctcagccttctgagtatctgggattacaggcatgtgccaccacgcccggctaattttgtatttttagtagaaacggggtttcaccatgttggtcaggctggtcttgaactcctgacctcaggtgatccacccacctcggtctcccaaagtgctggtattactgacctgagccaccgcgcccggccctcccataaaattttaataggagaaaacaggaactgggaaccccacggaccaaaactcttcccattaatgaacccgcaccctgagtcaggattctccggtgacggccctcctgtggtccctgcacaatctgagagaaatgcggcgctgcgggtacagagctgcccagagagggctacaggccagggcacagtcactaggcagagaagagacgggatgccccggggctggctgtcagcgcgccgccatcttatggctgcaggggactgagccgagctggggaaggagaactcggggtgcagattgtggagctgactgcggggaggcctgagtcccgccatagccatttcccacgggttccaaccagccccttccccctctcgggatgtcgcacccgtaactctcaccatttctaggcttccagggggtcctggagtcttagctgtggatctctcaatttctgcaggtcacaggcccacagaggctggacctctaggagcagaggacacagagcaatgaaagcgagacctggagctccggctgcagcgagagacaaaggcgccgccaaatcccggaagccatcttgtctgctccagctgcgtgcctgattggacggttcccagcccagcgtgcctgattggacaacgtttaaggtcctgacccttcaggccctgagtgacagaagatgtgatcagacactgggctgagtgaagactgatagcctgcgctgcagccttttcagccggggcttcctcttttagctgagccaggcccatcccatagggtatttgtatttaaccttgtgtataaggtcatatacatttataaatgatatatggctactcacaaagaaaaataatataataataattattttagaatttcagactttatgaccttcctggcttctggtcctttgagtaggcagcctgagaattttaaaaagaggcaatcctcaaataaaatgtgagccacatgtgaattttaaattttctagtagtcaaactttaaaaagaaaaaaacaagtggaattgattgtaacaatctaacccaatatatccaaagtactatcattttagtatgagagcaatatgaaattattgatgaaatacacatatatatgtatatatgtgtatacacacacacacacacacacacacacacacacacatatatggaactaaatctttgaaaataactctattttacctaacacattgcaattcagaccagccacattccaggcacccagtagccacacgtggccaatagctgccacattaaaatgcagctctgatgtcaggggggtgaagaagagcctgaacatcccttttttgccagaggtgaggggacagcctctctctaccaacatctctcttcaattccaaggaaaaaacagttagtgaccatagaaagaacagaggacagatagaataaaataaccacaggtcgacctgtggttacctctggttattttattaactactgctgcccacctgttgctcaccttaattccaaacatcagacagtgaacaaagaatgatgaagccacaaaacaagaaaactctgtatcttcagatctgtccacagtcttaacctccaatgtttagatatggagaaaatagattaaaggcaaacttattttgctatttggccttggccctaacggtcagcctgtggttatctgttttctcctgtggtgtggtgaactgtgtgagtataagcaccaatcacacgcagacatgtctacatgtatttttgcattattcaatattctcttacaagacataagactttaagtcaagaataaaggtaatgtgagtcttttttcttgcattggcgctacccacagggtgcatcatgacatattgctaagttctgcattcaggttatgtggctctcttcttttacccaggcccagaatattttgcacaatagaacatattactaggcccaacatatataaaatgggaggcccttgcctgagccttttttacagagggccttgtgacatatctctgcatcaatcacctaagagatgcaactgtccatttttccctgcactctgcccacaggaaaaattgtgacttatcattaagcctaggtagcaggtgatgtgtctctcctgcctgggccttgagccacagaaagcattgttacctattgctgggctcagcacccaggtgatgtgactctgctgcctgtgtcctgctgtcaggagaaggttgtaacatattcctatttaggtgatgtgacactcctgtctggtccctgccctcagaaaatattgtgacatattcctggcccaagtatgagagtcaacatgtccttcgggaacacttcaggacctttaaccttgggtacatcatctcacaattcagaagggcccttccaaactcaggaatgagcaagtggctgttggctgtctaggttctccatgagttcacatttattactgaatttatgtctgcttaaatatcaggtttgtttcttcaatttaggtgtataacactgataactgaggggtaatcataggtaatctgacttgaatcacaaagtttattcaaatggcatatctaaaaaattttagtactggtttatttaacacaaaaatgtgtcagaggccaggcgcagtggctgatgcctataatcccagcacattgggaagccaaggagggcagatcacgaggtcaagagatcaagaccatcctggccaacatggcaaaaccccgactctattaaaaatacaaaaattagttgggtgtggtggcacatgcctgcagtcccagctactcgggaggctgaggcaggaaaatcgcttgaactggagaggcggaggttgcagtgagctgagatcacgccactgagactccagcctggtgacagagcatgactctgtctcaaaaaaaaaaaaaaaaagtggcagagtattttcctgatgttcaactatttttgtttttcctgaattagcagttttatgaatcagtgtgttctttagaattctcacaatccttacccagtccaaacaatataattttaaaattatcagaaacctgtactcaacttgtctgggctattttcatcttttcatgaatctccttacagacacagtactctaggattttgcatgtttttgaagtttgtagaaactacatcagaattaaaccattaactgtagaaatgacttcaaataattataaagaaacaaatgaaacaaacttattatgtctgtgacctgcaataacttatcataaccataattatgactaatagcttatactcagatatataagatttttagaaatttcataatattatgaaataaatgttaatatatattaaaatagaagttgaagaagatcaaacattatctttaattcaacaatgcttttcatgtaatttaacatatcaaataattacgttttttactcttttggatgttgcatagaccctctgtagcatccaaaagttaggggtctaggccgtgcccagtggctcacacctgtaatcccagcacttagggaggccaaggcaggtggatcacctgaggtcaggagtttgagaccagcctggccaacttggtgaaaccctgtctctactaaaaatacaaaaaattagctaggcgtggtggcaagccgctgtaatcccagctacttgggaggctgaggcaggagaattgcttgaacctgggaggtgaaggttgcagtgagccgagatcatgccattgcactccagcctgggtgaaagagtgagatgctgtctcaataaaaaagaaaaaaaaagttaggggtctaataatacataaaatttgtgttcaagagaaaattgttatactttttaattagtgtattatcaatggtaaagctaattttaataaaaccttacaagtaaattcatcaaatttgtcatttttggccaatctagatttccataaatatgttataatctctcataatcatttaaactttttatattttatttttatctactattttattttttcaatttgacacaaccattaagtaatttcaaactacactaaatgtttctaacttccttcatcaaaagcattttttgctttcgtttctacactctatgcagaattgtttttcgtacatctaattgatttaattatatataaatcacattaactctttttttttaagatggagtctagctctgtcacccaggctggagtgcaatggcgggatctcagctcactgcaacctctgcctcctaagttcaagcaattctcctggctcagcctccagagtagctgggactacaggcgcatgccactatgcctggctaatttttgtattgttagtagagatggggtttcaccgtgttagccaggatggtctcaatctcctgatctcataatcctcccgcctcagcctcccaaagtgctgggattacagacatgagccacagtgcctggcctcattaactcttaacaaccttttagtgaaattcctaggaagcaattttgaactgtttcagtatttgtagacaaaatttattttatattttaaataaatattttttaaatttttttaaaataacaaatctaaatatatttagcttttttatattacataaaaataagattctgatcaggcatggtgtctcatgcttgtaattccagcactttgggagaccaagacaggaaggctgtttaagcccaagaattcaagtccagctggggcaacatggcaaaatcccatgtctacaaaaaatacaagaattagctgggcatggttgcctgcacctgtaataccagctattcaggaggctgaggtaggaggactgcctgagtccagaaagttgaggctgcagtgatccatgatgaggctattgcaccccatcctaagtaatagagtgagaacctttctttaaaaaaggccaaagcacatgaacttaatgttatggggttttttttggtttattattattattttaatagttttgggggtacaggttatgtttggttacatggataagttgtttagtcgtaatttctgagatttgggtgcacccatctcctgagtagtgtacactgtatccaatgtgtagtctttcatctctcacccacctcctgcccttccacctgagtccccagagttctgtgtataattcttatgcctttgcataagagcttagctcccactatttggtttttcatttctgagttacttcacttagaataattgtctccaactccatccaggttgcttcaaatgccaatattttgttcctttcttgactgagtagtatttcattgtttgtgtgcgtttgtgtgtgtgtgtgtgtgtgtgtgtgtgtgtgtatatatatatagtgatatatatgcgtgtatatatataatgtgaaatatatatatatatatatatatatatatatatatatatgcacacatatatatcacatttctttatccactcattggttgatacgaatttaggctggttctgtatttttacaattgcaaattatgctgctgcaaacgtgtgtgcatgtgtctttttaatataatgatttctttttgtgtgtgtagatacccagcagtgggactgctggatcaaatgatagttctatctttagttttttgggtttttttttttttttgagacagattctcactctgtcacccagctggggtgcagtggcacgatcttggctcactgcaacctctgccacccgggttcaagggattctcctgcctcagcctcccaagtagctgggattacaggcgcctgccaccacgcccggctaattttttctgtatgtttagtagagacggggtttcaccatcttggccaggctggtcttgaactcctgacctcctgatccacctgcctccgcctcccaaaatgctgggattacaggcgtgagccacccctcccagccctacctttagttctttaaaaaatcttcatactgtttttctctagtggttgtactagtttacattcccaccagcagtgtaaaagtgcttttgtttcaccacatttctgtcaacagctagtatttttaaattttttaattaagaccattcttgtagtgtggggaaaagcaagagagatcagattgttactgtgtctgtgtagaaagaagtagacataggagactccattttgttctgtactaagaaaaattcttctgccttgagattctgttaatctatgaccttactcccaaccccgtgctctctgaaacatgtgctgtgtcaaactcagggttaaatggattaagcgttgtgcaagatgtgttttgttaaacagatgcttgaaggcagcatgctccttaagagtcatcaccactccctaatctcaagtacccagggacacaaaaactgcggaaggccgcagggacctctgcctaggaaagccaggtattgtccaaggtttctccccatgtgacagtctgaaatttggcctcctgggaagggaaagacctgaccgtcccccagcccgaggaaggcatctgtctcctgcccgtccctgggcaatggaatgtcttggtataaaacccgattgcacgttccatctactgagatggggaaaaactgccttagggctggaggtgggacaggcgggcagcaatactgctttgtaaagcattgagatgtttatgtgtatgcatatctaaaagcacagcacttgattctttaccttgtctatgaatgcaaagacctttgttcacgtgtttgtctgctgaccctctccccactattgtcttgtgaccctgacacatccccctctcagagaaacacccacgaatgatcaataaatactaagggaactcagaagctggcgggatcctccatatgctgaacgctggttccctgggtccccttatttctttctctatactttgtctctgtgtctttttcttttccaagtctctcgttccacctaacaagaaacacccacaggtgtggaggggcaacccaccccttcattgtaggagtaaggtggtatcacattgtggttttgatttgcatttccctgatagctagtgatgtttagcatgtttttatatgttttttggccatttgtatatctccttttgagaattgtttattcatgtttttagcttactgtttcatgggattttttttttctgattcttttgagttccttgtagattcagaatatttgtcttttgttggatgaatagactgtgaagattttctcccacttggcggcttgtaagtttactttgctgattatttctattgtggtcaagaaggtttctggtttaattaagtcccatttatttttctttgtttttgttttatttgcttttgggttcttggtcatgcactatttgcctaagccaatgtctagaacagtttttctgatgttagcttctacaatgtttacagtttcaagttttagatgtaaatattttctccatattgagttaatttttgtataagataagagatgaagattcagttttattcttccacatgtggtttgccaattatcccagcagcatttgttgaatagggtgtccttttcctaccttacatatttatttactttctcaaagatcagttggctgcaagtatttggctttatttctgagttcactattctgttctatttgtctgtgtgtctactttcataccagtagcatgttgttttggtaactatagcctggtagtatagtttgaagttaggtaatgtgatgcctctgattttttactttttgcttagtcttgctttggctatgtgggctttttttaggctctatatgaattttaggatttcttttcctaattctgtgaagaacgatggtggcattttgacaaaaactgacttgtagaatgctttcgtcagtatggtcatttttacaatattgacactacctatccatgagcatgggatatgtttccatttgtttgtgatatctatggtttctttaagcagtgttttgtaattttctttgtagatgtatttcacctccttggttaggtatatttctaattattttatttttttgcaggtttttgcaacgagttgagttcttgattcgattttcagcttggtagctgttggtgtatagcagtggtgccgatttgtatacattgattttgtattctgaaagtttactgaatgtattcattagatctagaagctttttaataaatctctagggttttctaggtataaaatcatgaattcagaaaacagtgacagcttgacttcctctttacagatttgaatgcaatttatttatttatttttattgtctaattgctccagctaggatttccagcactatgttgaatagaagtgatgtaagtgaccattcttgtcttgttccagttgtcaggaagaaagttttaatttttcctcattcagtataatgttggccatggatttgtcacagatggcttttattaccttaaggtatgtacccccgtgccgattttgctgagagtttcaatcataaaaagatgctggattttaaatatgtttttctcgtctgagtgtggtggcttatgtgtgtaatcctggcagcttgggaggccaagactggtgggttgcccgagctcaggagttcaagactagcctgggcaacatggtgaaactctttctttaccaaaatacaaaaaattagctgagtgtagtggcgcacacctgtacttttaattttagctacttgggaggccgaggcatgagaatctcttgaacccgggaggcagaagtttcagtgagccaagatcatgtcactgcactgcagtgcaggtgacagagatttcatctgaaggaaaaacaaatgttattctgcatctgttgagatgatcatatggtttttgtttttaattctgcttatgtgaggtatcacatttgttgacttacgtatgttaaaccacccctacatccctggtataaaatgcacctgatcatggtgtattattatttgatatgctgttgtatttggttagctagtattttgttaagaatttttgcatctatgttcatcaggaatattagtgtgtagttttgtgctatgttctttcctggttttggtattagggtgatactggcttcatggaatgatttaggaaagatatcctctttctctatttttgaaatagttttatttaggttggtaccaattcttccttaaatgcctcatagaattcagctgtgaatccatctggtcctggacttttttttttttttttggaaattttttattactgtttcaatctcactacttgttattggtctatgcagagtttctacttctttctggtttaatcaaagagggttgtacatttccaggaatttatccagctcctctaggtttcctagtttgtgcatgtaaaagtattcatagtagccatgaattatcttttgtatttctgtggtactggttgtaatatctcacattttgtttctaattgagcttatttagatgttctttcttcttttcttggttaatctcactaatggtctattaattttggttatcttttaaaaaacaaatttttgtttcatttgtcttttgtgctatttaaaatttcaattatgttaattcttctctgattattgtttgtttttttgtttgtttgtttgtttttgttttttgctgggttggggtttggtttgttcttgtttctctagttccctgaggtgtgaggttagattttcaatttgtgccctttcagactttttgatgtaggcatttaatgctatgaactttcctcttagcaccacttccgctgtattccagaggttttgataggttgtgccactactattgtttagttataaaaaaatttaaatttccatcttgacttcattgctgacacaacaattattcaagagcaggttatgtaatttccatgcatttgcatggttttgaggatttattttggagttgatttccaattttattccaatgtggcctgagagaatacttgacataattttgattttcttaaatttggtgagacttgttttgtagcctaattatatggtctattttggataatgttttatgtgctaataaatagaatgtatattcttcagttgttgagtagaatgttttgtaaatatctgttaagtcaatttattctagagtatagtttaaattcactgtatcttagttgactttctgtctagatgacctttctagtattgtcagtggggtattaaagtaccccattattattttgttgctctctatctcctttcttatgcctagcagaaattgttttataaatttgggagctccagtgttaggtgcatatggatttagaattgtgatgtcttcctgtttggactagttcttttactattatataatgttattctttgtttttttgttttgttttgttttttaccattgttgctttaaagtctgttttgtctgctatgagaatagctactcctccttactttttgtttccatttgcatagaatatctttttccatttctttgccttaagtttatttgagtttttatttgttaggcaagtctcttaaagacagcagatacttggttggtaattttttttcttcttttgagatggagtgtcactcttgttgcccaggctggagtgcagtggcacgatcttggctcactgcaacctttgcctctcaggttcaagcaattctcctgcctcagccccctgagtagctgggattacaggcgcacgccaccatacctggctaatttttctattttagtagagatggggtttcaccgtggtagccaggctggtttcggactcctgatctcaggtgaaccacccacctcggcctcccaaaatgctgggattacaggcgtgagccaccgtgcctagccataaatttttatttattctgccattctgcatcttttaagtagagcatttaggttattgacatttaatgttagttttgagatgtgaggtactgctgtattcatcaggttagctgttgcctgcatatctttgagtttttttgttattgttttataggccttgtgagacttatgcattaaggaggtactattttggtgtattttgaggttttgtttcaagatttagaagttcttttagcatttcttctattgctggcttggtactggtaaatcctctcaacacttgtttttctgaaaatgactttatctctccttcatttatgaagcttaccctcactggatacaacattcttggctaaaaattgtgttgtttacggaggctaaagacaggactccagtcccttctttcttgtagggtttctgctgagtaaactgtgttaatctggtaagttttgtttatagggtacctaatgcttttcctcacagctcttatgattcttttcttcatcatgaatttagataacctaatgactacatgaataggtgatgatctttttgtgataaattttccaagtgttttttgagcttcttgtgtttggatgtctagatcattagcaagacctgagaattttttctcaattattcactcaaataaaatttccaaacatgtaaatttatctttttgtttttttcaggaccaccaattactcctaggtttggtcatttaacataatcccaattttcttagaggctttgttcattttgttgattctttcttctttgtctttgccagactgatttaatctgaaagacttttcttcaagctctgaagttctttcttcaacttgttgtagtctattgtttaaactttccagtttattttgtatttctgtaagtgtgtctttcatttccagaagtggtgattgttttttaatttatagtatttattcctttggaaatttttaaattcatatcttgtattaattttttaaatttctttaagctggttttcttgttcctctggtttctctagtagcttaataatcaactttctcaatttattttctggcaactcagacagttcttcttggtttagaatgattatagaagagctagtgcaatattctggggttgttatagaaccttgttttgtcatattggaattacttctctggtttcttctcatttggctagactatttcagtggaaagatcttggactcaaaggctcctgttcagattcttctgtcccatgtagtgatttcttgatgtggtgctttctcacttttcctagggatgggctttctgcaagtcagactacagtgattgttattgttcttctgggactagtaaaccagtggagctctacagctccaggctgatattgaggaatgtctacaaagtgtcctgtgatgtaatctgtcttcaggtctctcagccatgaataccagcacctgcttcagtggaggtggcagggaagtgaagttgactgtgtgagagaccttggttgtagttttatttagtgcattggttttctcaattgcttgttatgcaagcagtgaatttgtcatgtggacagactcaggacctctggttagccaggatgttacaggtggtggaattagtttttctttttttttttctttggagcagggctgttctgttacgagtcgctgttatggcttgtgtcagttggcctccagccaaaaggtggtgctttcaggagaacaccagctgtggtagtagaaagggggtatagacttgccctagttaaccaggatacccgttcaggattctcaggtgatgggtgggaccatagatcttccaaaagttaatttattttgccttcggctaccaggttgagtagagaaaaatcatcaggcagaggcaggattagaccggtctgagctcagactctcagggggtgtggcttgctgcagccactgttggaggagaggtggttctcaagccaatggagttatgttttaagggaggttatggctgcctttgctgcttcatacagagcaccaagaaaagcgagaaaaagctggcagtggcaggcctcacccagctcccatgcagccagcaaggcctgtctcattccattcccaccctgtcctgccaaaagcatggagtttatatcaaggcagccagcgtgcagagttgagatcttgccccaggctacatgcctatccctgagaaagtcagaaaggctttcaggcttcacccctccccacctgcccacacacttagctgcacagcttctgtgcttatatctgcacttcctattcacttctgcagactctgcgcagtaaaatttatgcttggtcaaaattattgcacagttcactaaaagcttttttaatttttttggcccctccctaattctgctggctgcctttcacaaagacccttgtgagataaagtcaggtatgactcttttggtcatgagctggggactgggaatgcctatgggctctttccctggctgcttcttttatatttcactcagctccctaaattcatttcagctctaggtaaggttaaatacatttcctttgatctggatttttcaggtccccctgtggggatgtgtgttcaaaggtagactttctttctcttacactttggggaactcacagttcttcagctgtgtcacagagtttgcagtaacaagctgcttttttcaaagggtctgtgaaatcttttgttttttcttggtatgttcctgcagtggttatgtcagaggcgttcgaaacagagcaactccattttgagtgagggctacaaaaatgaggctgagacgtcgggcgcggtggctcaggcctgtaatcccagcactttaagaggctgaggcgggcggatcacgaggtctggagatcaagaccatcctggctaacacggtgaaaccccgtctctactaaaaataccaaaaaatagccgggcatggtgtcgggcgtctgtagtcccagctactcgggaggctgaggcaggggaatggcgtgacccgggaggcggagcttgcagtgagccgagattgcgccactgcacgccagcctgggcgacagagccagactccgtctcaaaaaaaaaaaaaaaaaaaaaaaagaggcttaggcttgctgggctgtatgcccagaaaattaggcattcctagcctctaaatgtttatggttaagggaacaaattaataatgtttaccaaacagactcagacttgggtgtgtccagatatcctgacatctggagaacaaaggcattcctaattttgctttaaagataataatatcgattctcacaaaatatagtaagaaaattaattatgtattacaaacccttgtagcagaacacatctccccacatatacaagcattgtacctagggggatgcattcttctcttactttcaggaacgtcctgttttgtctatggactagctgtcctttcaccactttactttcttaataaacttgcttttgctttgcactgcggacttgccctaaattctttcttgcgtgagatccaagaaccctctgttggggtctggatcgggacccctttcctgtaacatgtttctggtgaccacagaagggactatagtgcagaaaccctgacccaatggctacctttgcctaagtgttgaggtcctgtaacatctttctggtgaaccacggaagggacgatactaaagaaaccctccaacccaaaggaaataggctgcagcactgattggatgactttgggtaagtggtggggtacccggttaaagaataggattgggttagaggcccctcttaataaaaggaaagaatgcttgactgaccccgacgtcagacgcctgatttaggagagttagagtcccttctaaggtttagggacctcttggtaaagtccctctcagctgaaaacgggcttggcactgcaggctatgctctttgtattaatctgccttctccttgctgcatgaatcaatttcttgggtgctgtctctgtttcattgtcatgattttattttattttattttttagatgtgtctcactctgctgcccagtctggagtgcagtggcgcgatctcggctcactgcaacctccacttccagattcaagcagttctactgcctcagcctctcaagtagctgagactacaggcgcttgccaccatgcccggctgatttttgtatttttagtagaggtggggtttcaccatgttggccaggctggtctcaaactcctggtttcagatgatccgccggcctcggcctcccaaagtgctgggattacaggtgtgagccaccgagcccggtcttcactgtcattttcaggaaactttaactgatcttagggatgttaacttattctttttctgtgtgcctcctgatttccgtccgtttgcttgtgaaacattgggaacaaaaagcattgaaggctccgtctccaaaatggctaattgagatttagtatttaacagctatgagcaataaaattacatagatgtggttttgctttgttgctgctatagtgactaggcgtgatcgagaagcactaggatggaaatcagggaacttttctccttgctgttttgtttcactttgcacactaaaaatacaattctttcctttcttggattcaggcaaactggctctgcttgtttaatccacactgtcgctattgcccagaacctgcttgctctggtcattcccatctaaatcttcttcatttcctttgccttattcgacatttttgtcaaagtccatttgtggtttaagattcatggcttggccaggcgcagtggctcacgcctgtaatcccagcactttgggaggccaaggcaggcggatcacgaagtcaggagatcgagaccatcctagctaacacggtgaaaccccacctctactaaaaatacaaaaaattagctgggcgtggtggcgggcgcctgtagtcccagctactcgggaggctgaggcaggagaatggcgtaaacccgggaggcggagcttgcagtgagcccagatcgcaccattgcattccagcctgggtgacagcgagactccgtctcaaaaaaaaaaaacataaaataaaataaaataagattcatggcttggctcacttatgttagttggataatgtgaaacatgtttgatgagagaaaaagaagaaaaagagctagacatgcaagatgatcctttaatgcaagccccccccccgcccccgcccccgcccctggttcagcgtgcagttttgagtggagcagacccttctgtcacctctaaaggttcagatgtgtcggtcctttcttcctctagcccacctgaaagttctgttgataatccttcatctcctcttccttaccggactagtccctctctacacccaccactccctgaggaactgagcccaacgagtactactctagtggagctgcctatcaacctccaaagggaaatctgtccacttacagaggtggcaaatggggaagaaggcactgtgagaggacatgtccccttttctatgtctgatttggctctatgtaaagagaagtttggtcatttctctgaagatccaggaaaattcctagatgagtttgagaaattaactctgacctatagtttaactggacaggatctgcacattttgttgtctctgtgttgtacagtaaaagagaatgcattttggtgacagctagggcgcatgcagatgaggtattgtcttgaaacctgaaccataatatatatcaggcaggaggttcagcagttcaagatcaagatccacagtggaactatcaaagaggcagtgaggacttggggtggagagagaatatggtcacttattttttgaaagggatgaagaaatgtatgaaaaagcctgttgtgggaggccgaggcaggcagatcacaaggtcaggagatcgagaccagtctggctaagatggtgacaccccgtctctactaaaaatacaaaaaattagctgggcgtagttgtgggcacctgtagtcccagctacttgggaggccaaggcaggagaatggcgtgaacccgggaagtggagcttgcagtgagccaagatcgtgccactgcactccagcctgggcaacagagcgagactctgtctcaaaaaaaaaaaaaaaagaaaagaaaaagaaaaagtctgttgactataaaaaggttaaggaagtttctgagggcaaagatgagaatccaactttgttcaagggcgtttagttgaagaaatcgggatatatactaacattgatcctgcctcaagggaaagatgaaccattctgggagtacattttataacccagtctgcccctgatatccatagaaacctattaaaagcagctgtgagtccccaaacttctaaggaacagctgtggatatagaatttttagtttttaataacagggacaaagcagaggaagcagaaagtgcaagaaggacctcccacaagcacggctcttggctgcagccttaagctcacatcaaacatgggattgcctcctggctcttggcctgaacaagggaagctgaaaggtgggaagcccaaagctgggcatctgagtcaccatgctttgggcataaatcagtgtgcacattgtaagaaaactggccattggaaaagggattacccagcattctgaagggagccatcagcacccaaacccatgatggctgaaatagccaggcaagcccaagagcgatgggactgagaccttcagccacagctcctgttggacaactaactatatctatggaggagccttgggtaacccttgatgtggcaggtaagaatattacattccttctggaatgctaactctgttttgacccaccatgttttacctatcctttaagctgctcttcagactttgaatgccccaccccttgttgggaagggatctgttaattcagaataaatatcagtgatatggtttggctgtgtccccatcaaaatcacaacttgaattgtatcttccagaattcccacatgttgtgagagggacccagtgagaggtaattaaataatggggaccagtctttcctgtgctattcttgtggtagtgattaaacctcaccatatctgatgggtttatcaggggtttctgcgtttgcttcttcctcatttttctcttgctgccaccacgtaagaagtgcctttcaccttccaccatgattctgaggtctccccagccatgtggaactgtaagtccacttaaaactctttttattgccagtttcaggtatgcctttatcagcagcatgacaatgaactaatacagtaaattggtaccagtagagtggggcactgctaaaaggatacccaaaaatgtggaagaagctttggaactgggtaacaggcagaggttgaaacagtttggatggctcagaagaagagaggaaagtgtgataaagtttgtaacttcctagagacttgttgaatggctttgcccaaaatgctgatagtgatatggacaataaggtccaggctgaggtggcctcagatggggatgaggaacttgttgggaactggagtaaaggtgactcttgttatgttttagcaaagaggctggtggtattttgcccctgccctagagatttgtgaaactttgaacttcagaaagatgatttagagtatctggcagaagaaatttctaagcagaaaagcattcaaggggtgacttgggtgctgttaaaggcattcagttttacaagggaagcagagcataaaagtttggaaaatttgcagcctgactatgcaatagaaaagaaaaacccattttctggggagaaatacaagctggctgcagaaatttgcataagtagcaaggagcctaatgtaaatccccaagaccatggggaaaatgtctccaggccatgtcacagaccttcatggcagcccttcccatcagatgcctggaggtccaggagcaaaaaatggttttatgggctggccccagggttcctgtgctgtttccagcctaggaacttggtgccctgtgttccagctgctccagccatggctgaaacgggccaatgtacagctcgagctgtgcctttagagggtggaatccccaagcctcagcagattccatgtggtgttgagcctgcaggtgcacagaagtcaagaacagaggtttaggaacctctacgtagatttctgaagatgtatggaaacccctgaatgcccagatgaaagactgctgcaggggcaggcccctcatggagaacctctgctagggcagtgtggaaggaaaatgtggggtcagagcctccacacagagtccctactgaagcaccatctaatggagctgtgagaagagggccaccatctttcagatcccagaatggtagatccaccgacagcttgcactgtgcacccagaaaagccacagtcactcaacgccagcccatgaaagcagcaaagagaagcccgtactctgcaaagccacaagggtgtagctgcccaagacaatgggaaaccatcttttgcatcagcataatctggatgtgggacatgaagtcaaaggagatcattttggaactttaagtatttgaccaccccactggatttcggacttgcatggggccttcagtccctttattttgaccaatttctcccatttggagtggctacatttacccaatgcctttactcccattgtatctaggaagtaacgaacttgctttgattttactggctcataggtggaagggacttctctggtctcacatgagaatttaaactgtggacttttgagtttatactgaaatgaattaaaacttcaggggacaggccgggcatggtggctcacgcctgtaatcccagcactctgggaagccaaggcgggtgggcggatcacgaggtcaggagattgagaccatcctggctaacatggtgaaaccccgtctctacttaaaatacaaaaaaattagccaggcatggtggcaggtgcctgtagtcccagctactcaggaggctgagccaggagaatggcatgaacctgggaggcagagcttgcagtgagcagagatcacgccactgcactccagcctgggcgacagtgctagactccctctcaaaaaaaaaaaaaaaaaaaaaaaacaactttgggggactatttggaaggcatgacgggttttgaaatgtgaatgtatgagatttgggagagaccaggggcagaatgatatagtttggctctatgtccacatgcatatctcatcttgtagctcacataattcctccctcttgtggaagggacccagtgggagaggattgaatcattgaattgtagatgattgaacagcatcttttctgtgctgttctcatgacagtgaatgggtttcatgagatctgatggttttaaaaacgaaagtttcttttcacaagctctctgtctgctgccatccatgtaagaagtgatttgctcctccttgccttccatcatgattgtgaggcttcccaagccatgtggaactgtaagtccaataaacctccttcttttgtaaattgcccagtcttgggtatgtctttatcagcagcagcataaaaatggactaatacattaatttatattttatttagttagaacattccattttcatttattaattggagaaccctacatgagcctacatttctttagttattgttcctttcactttttataaatgacataagtaaatttattgattgattgggccaatttgttcaggtcagtactagggagacttcataagtcatgaggatgtttctatacataaatgcagcaaacaaacatgacagggcttgctgtgtcacagatgctttataatacaccataaatattcctgctggagttagtttgtaacttcaagtcagggatggaaaatagcaatggtgaagaaataacatttattcttcatgtggagaggacatgttttccaggctgcaaagctgactcttgctgaatttaaagatcaattctgcctttttcctttcctaattattctcagttttgtttgtcttattatggggattccaagaatgtatgcatcacagcccttctttatttattgtgtattggtgacagttttctcactgttgtctttatgccatgacattttacatggtactttgtaggttctaatttaaaagttggtactttttattgcacagaaaattgattttaactagaaaatttatttagcaatgtaactttcagattagttaattaaaataagaggcatatactgtccacaggtgagaaaattacatcagttagcattgtttttctttgtttgtcaaagaaaactcttattcaattcttttttttttttttgagacagtctgactctgtcacccaggctggagtgcaggggtgaaatctcagctcactgcaacctctgcctcccaggttgaagcggttctcctgcctcagcctcctgagtagctgggactacaggcgcgtgccaccacgcccagctaatttttgtatttttagtagagacagggtttcaccatgttggccaggctggtcttgaactcctaacctcgtgattcacccatgtcggcctcccaaagtgccgggattacaagcataagccactgcacccagcctacattcatacacaaattctggcaaatataaaatttgtgagatactatatctttgaaattagacttttgagagggttaatgatacataattgttttaaatttttattttattttattttattttggagagggagtctcaccctgttgcccaggctggagtgcagtgatgtgacgttggctcaccacaacctccgcttcccggttcaagcaattcttctgcctcagccttcaaagtagctgggacaacatgcgtgcaccaccatgcccggctaatttttgtatttttagtggagacggggtttcattatgttggccaggctggtctcaaattcctgacctcgtgatccacccacctcagcctcccaaagtgctgggattacaggcatgagccaccctgcccggtcaatgatacataattttaaatttaattttgctgtgatatacttacagcacaactttctttttttctttctttcttttttttttttgagacagagtcttgcactgttgcccgggctggagtgcaaaggtgtgatctccactgactgcaacctctgcctcccgggttcaagcgattctcctgcctcagcttcccaagtagctgggattacaggtgcctggcaccacgcctggctaatttcttgtatttttagtaaagacagggtttcagtatgttggccaggctggtctcaaactcctgacctcatgatccacccacctcggtctcccaaagtgctgagattacaggcgtgagccactgcgcccgacccaacttacatctttatgcagagtcttctgtttttacgtgtgaatgttaaatgttgcacaataataaaatgagctctgtggatatgaaatttagaataatatttctttcacatattgctataacaatatgaagaaatttctcactcttattttatataattttttctgtgagtgaagttcagtctacagtttttactgatagtcacctaactgtaggtatctccttggtcactggtaagtgactgattagtaatgccaatctatttcattttagtcactaagaaaacaatattttaaaattttcaatagaaaaaagtattattatattattgtttctgaaactttcagacactgtagaccattcaatcaataatgatgttgatgtagacaacaaattgtctatataattataagctcattttagcttttaatgtaaaaattcagtatattttataagcaaaattagcagctcttttaaatcactagagaaatattgttgttggaatccatttaccaaagtatttgtgttaggcttagtaatgagtactttaaaccaaaaatcaagttctacatactatctaagggttaaaaaaaaagtggtttttaagtttctatttatttctactatattataaaattcaaagccgaaatgttaggtcaggaatgaaagcaagaattggatatgacggtgctgggcacaatggttaagactgaaacttggtatcaggtggttcctgattgcattttgtctgccacttgtgggctgtatgacctgaatacattttcatgacctctctgtgcttgactcttcagttgcacagtgaggataatagtgcctaaattctagggttttgtaaaattaaggcaactaatgctgataatgatgccataggtacaccaaccacatagcaagtgtacagaaaatttattcacttttatttgttaattgttacatcataataaatgttaagcctgaaaaacaggtggccacatcagtgatttgcaacccatgtttattctttttttttttttgagacagagtctcactctgttgcccaggctggagtgcagtggcatgatctcagctcactgcaacctccgcttcctgggtttaagcaattctcctgcctcagcctcccaagtagctgggactacaggcacctgccaacacgactggctaattttcgcagttttagtatagaaggggtttcaccatcttggccaggctggtcttgaactccagaccttgtgatccatccacctcagcctcccaaagtgctgggatcacaggcatgagccaccacgcccagccacccatgtttatactaatcagccagtcttgggctataatggtagttagatttattttattttatttttgagacagagtctcgctgtgtcatcaggctggcgtgcaatggcactatcttggcttaccgcaacctccgcctctcgggttcaagcgattctcctgcctcagcctcctgagtagctgggattacaggtgcacgccaccacgcacggctaattttgtagttttagtagagatggggtttctccatgctggtcaggctggtctcaaactcccgacctcagttgatctgccctccttggcctcccaaagtgctgggataacaggcatgagccactgcacccggccagtagttgagtgcttttaatgctacccttggaaaattcccatatatttacatatatcacggatataaatattataaaaagatttctcattgagtattgctctttagcactccagtaacactagacaaataagcagttaaggccgggcatggtggctcacgcctgtaatcccagcactttgggaggcagaggagcgcagatcacgaggtcaagagatggagaccatcctggccaacatggtgaaaccccatctctactaaaaatacaaaaacttagccaggcgtggtggcacgcacctatagtcccagctacttgggaggctgaggcaggggaattgcttgaatctgagaggcggaggttgcagtgagtagagatcgcaccactgcactccagcctggtgacagagggagactctgtctcaaaaaataaaataagttaaataaataaataaacataagcacttaaatattgagcatttgctagttttaaaatgaaagtaggcaaattgtttccttacttatttaataaatttctaattgccaagtacctatgtttatttgaaaaattgaaatgtagtgtaaaaatatatttaaatacctttatttcctaacaaataaaagaaatcatttatttagagagaattttactctaaacaattgctttagagtgtgtcttttaaagtattatattattttgaacattaaaaataaagataatgggccaggtgcagtggttcacgcctataatcccagcactttgggaggccaaggtgggcaaatcacctgaggtcaggagttcaagactagcctggccagtgtggtgaaaccccatctctactaaaaatacaaaacattagccgggcgtggtggcacatgcctgtaatcctagctactcaggagtctaaggcaggagaatcgcttgaacccgggaggcaaaggttgcggtgagccgagatcgcgccattgcactccagcctgggcaatgagcaagactctgtttcaaaaaaataaataaataaataaataaaaataaagataatttattcctgactactgggttcagactattcataatactagaagttttctcatctacatcactcattcagtaagccatttcaaagaacaaaaatacttacgttttctgaaattttaagattgaaaaacactgttttctctggcctaatttctttttttttctcttttctttttcttttttttttttttttgagacacagttttgctcttgttgcccaggctggggtgcaatggctcaatctcactgcaacctctacctcccagcttcaagctattctcctgcctcagcttctcgagtagctgggattacaggcatgcaccaccacacccggctaattttgtatttttagtagagacagggtttctccatgttggtcaggctggtctcgaactcccagcctcaggtgatcctcccacctcggcctcccaaagtgctgggattacaggcgtgagccaccatgcccagcatctctggcctaatttcttaaaatttacttctcaatttttaaaaataatgtattaatagtatttttgattggcaaattatagtcgtatacattgatagtgtaaaatgtgatgttttattttatgtatacaatataaaatgattaagtcaagttaaataaaatatctaacaacttgcttacctatcattttttgtggtgagacatttgaaatttagttattttgaaatttacaacacatgattgtttactatagtcaccctgctgttcaatgtatgtcaaaacctatttaccctgtctatgtgaaactttgtaccctttgataaacaatctgtatttctttctttctttcttttttttttttttttgagatggagttttgctcttgttgcacaggctggagtgcaatggtacaatttcgactcactgcaacctctgcctcccgggttcaagcaattctcctgcctcagcctcccaagtagctgggattacaggcatgcaccaccacacccggcgaattttgtatttttagtagtgatggggtttctccatgttggtcaggctggtctcgaactcccgacctaaggtgatctgcccacctcagcctcccaaagtgctggggttacaggcatgagccgctgcgcccggccacagttctctatttctttcccaccaccctcaacctctgataactattattccactttttgcttttttgagttaaactttcttaggtttagtatataaataggccgggcatggtggctcatgcctataatcccagcactttgggaggccaaggcgggtggatcaggaggtcaggggtttgtagaccagcctgaccaacatggtgaaaccccgtctctactaaaaatacaaaaaaattagctgggcgtggtggcgggcgtctgtaatctcagctactcaggaggctgaggcaggagaattgcttgaacccgggaggcggaggttgcagtgagccgagatcacaccactgcactccagcctgggcgacagagcaagactctgtctccaaaacaaaacaaaaaaacaaacaaacaaaaatataaataaattatgcagtacttaacctatttgtgtctggcttattttatgtagcataatgccttctaaatttatctctattgattcaaatgatgagatttacccacttttaaggctgaatagtgttccattgtttatactacatttttagaagaattaatttaatatatatttatctgttggtggaaaaactcatgttatgaaataatatttctatgttaaagcatgttagtgtaattttcagcctataaatatcttattaaaagtagctaatttatacagagcactaattgtaacactatgcatgtgttactgaattcaattttcacagtaacttaataacataggtcttattattattctcattttacagaggaagaaacagagccactgagagaaaggacttggtcacactagcaaagccagtattaaaacacaaacagcggccgggagctgtggctcatgcctgtaatccagcactttgagaggccaaggtgggcgaatcacgaggacaggagttcgagaccagcctgaccaacatggtgaactcccatcactactaaaaatacaaaaattagctgggcatgatggcaggcacctgtagtcccagttactcaggaggctgagacaggagagttgctggaacccaggaggtgaaggttgcagtgagccgagatcatgccactgcactctagcctggtgacagagcaagactccgtcaaaaaaaaaaaaaaaaaaaaaaccacaggcagcttggtatccagagataaccctcttcagtacaacaataaaaactctcttcaagcagaaaagacataattatttttaacactcatttttaataaacattttacaaaaattaaataattggatgcatttttattgttctatgtgtgtattagtatataaaatggtacataaaaaaataagccagaaaacaatagttaatatttgcaataaatataactggaaagtagttaactatcatttgcagatgatatctttgtttactgagataataaaagcaactgaaagacttttaaaagtctattcagggccgggcgcggtggctcacgcctataatcccagcactttgggaggtggaagtgggtggatcacctgaggtcaagagtttgagaccagcctggccaacatggtgaaaccccgtctctactaaaaatatttttaaaaaaaccaattagccgggtgtggtagtgggcgcctgtaatcccagttactcaggaggctgaggcaggagaattgcttgaacccaggagatggagattgcagtgagccaacatggtcccactgcatgcactccagcctgggtgacagagtgagactccatctcaaaaaaaaaaaaaaatgtccattcaggtgggaacaaaaaattctaagattatcctcaagattatcagtttgttgtacacctgtaatctttcattttcttgcaaaaaaatgtgtgactgtggtgggaaatcacccatgaaattaggttactattgggtaaactaaatcagaggtgcttttatatattttattttttttattttactttatttatttatttagagacggagttttgctcttgttgcccaggctggagtacaatggtgtgatctcggctcaccgcaacctctgtctcccagattcaagcgattctcctgcctcagcctccctagtagctgggattacaggcaggtgccacccacacccaactaattttgtatttttagtagaggcagggtttctccatgctggtcaggctggtctcaaactcctgacctcaggtgatctgcccgcctcggcctcccaaagtgctgggattacaggcatgagccactgtgaccggccagaggtacttttaatagaaagagacacatcatagaaaaacactccttgacctggaagtaagtgacttccagctgggccatgttgtaatctgctcatagtggccacatggaaggaaatatatttgtatattgtcattgtatctgcctcctacatgttgcttcaagtagggagaacaggaggatcccatggaagaggaaaaaaaggaggtctcatttgtgtgagaaataatcacctctaatctggaatagcttatgataaatagaagagaccacaacatgaccacatcaatgagagaaaaaaggcaacctggttaaaagtgctcactggcatttttaggcagcatttagtaaggcttagtgaatgatcagcctctggaataccaacagtctaccagcaaggctgaactcattctggttaaatcagcattctagtggcccagttttacactattcattacagaaatactgtggagatgagtgggtaccctgctagaattggccttattatgaaaaagcatacctaattatttgttttcacaatttaaaaaccttgaaaatgaccaggcgcagtggctcatggctgtaatcccagcattttgggaggctgaggcaggtggatcaagaggtcaggagttcaaaaccagcctggccacgatggtgaaaccctgtctctactaaaactacaaaaattagccaggcacagtggcaggcacctgtaatcccagctactccagaggctgaggcaggagaattgcttgaacctgggaggcagaggttacagtgggccaagatcacatcactgcactccatcctgggtgacagagtgactccatctcaaaacaaacaaacaaacaaacaaaaaaccttgaaaacatcatgaatttattaaaaatgtacttctgctaattgtggagcattctacaatactgtaatataatattgaactttaagcaccttaatatgaatgtttcttgaatgcatgaagagttatgtagatggtttcttttaaattaacatgagagaagtaatagagaaaagatttgaagtggaataaataatctaaaacacatttttttcaaaggcttggcataattactatgctttttgaaatggccatattactaaccagaagcaaaaacaagatttttgtttttctcagtcagtatgtttttgatcttttgaaatttaaaatcctggctaaaggatttgattttagtaagtggcttactaaagtattcaaggcaatacaaggataatttttataggtaggaaaatgcatactatatacacacattgctcttccctgtttgctttttttttttttttgacatggagtcttgctgtgttcctgaggctggagtggagtggcgctgcaacctctgcctcctgggttcaagcaattttcttgcctcagcctcccgaatagctgggattacaggcacacaccaccatgcccggctaatttttgtatttttagtagagatggggtttcaccatattggccagggtggtctcaaactcctgatttgagaccgcatccagccctctgacttgctttaacattgaaagactgcagattgcaaatctagtctcttgatttagagtaaattaacaaaagacttatttttcagccaaataattgtataaaatcaatgggtagggtcgagcggtggctcatgcctgtaatcccagcactttggttggctgaggcgggtgaatcacgagatcaggagttcgagaccattctggccaacatggtgaaaccctgtctctactaaaaccacaaaaaattaactgggcgtgtggcagcatctgtaatcccagctactcgggaggctgaggcaggagaatcacttgaatccggaaagaggagtttgcagtgagccgtgatcatgccactgcactcactccagcccaggtgacagtgtgagactccatctcaaaaaaaaaaaaaagggtaacagatgcccagatgccattatcagccaaaaaaaataatatgactagatttagtaagtatccagccatgcaaataacagcccaattaaattaagaccctaataagtgcatgtggaaagcatacatgtgcagcatggtgcacatccactcagcacctgcttctgcctctttagagatataccaattttccctgagtgactcagagtgactactaggaactgagaattctgtgttcagagggattactggaaacatggttaatacacttttttaatattataataaaattttatgaatcttactctgcctcacagtcttttagtaaaaaattgtttatatatagtactcaatttggattcatggaaaatttcaatattccaggtaagtcagacacacttaaatgtcaaccaaatttcataaaacatattcgagtcagattcaaatatgtttactcatattacctgggaatcaaaactgagagaagaataacttatttgttaaagttagagatgtagggaagacccactacttttgaccaacatctcctccacccctaaccacaggcaattatcattctactcactgtttctatgaatttgattttttaatattctacacagaaatgagattatgtgatatatttttattctgtgctggcttattttacttagcacagtgtcctccaggttcatcaatgttgcaaataagacttccttctttttaagggctgaatagcattccattgtgtaaatataccacattgtctttatccattcatctgttgatggacacttaggttgattccataacttagctattgtgagtaatcacttcctactctttcatttgtttgtatatcttttctttccttcctttgttatttctagaagtattttaatattaaaatataaattacaactctcaaataacttcatttctatgcctcctattggttaatattttggctgactgaacaaataagattttttaaaattacttggaacaaggccattacttcgtatttaacataatttgagaaaaaacagtaatgaaaatcaacactgattagtgaaacaatgattatctagcccctggtaataattttctctcccattcatcataaaagctgtctttgtgtcatctctcctagttgtaagaaagaggcttctgatccaattggtcagcataaaatattgtaaaatttaactttttggtcccaaaattaagctgctttttaacagaaaagttgatttttatatgtattattttattgtattatatttaaattcttcagcaaaactaaacaacacatacatttaaaattctctgaaaattaaaaatgcttaagaaacatttttatagaaactaaatctaaaataattttagattcttagagaacatttctcaaatacttcaagttctcctgttctgacagtagctatatatttttccatattgctataatagagctttggctgttctttgtggctaaatccaccatttctattctattttgttgtgtagtatttacgttatgcattttacattttaaaagttgtagtccatgcaatgcaattttaaacaattgacaaacattttttcatgtaaaattctgtgcttattcagcagtcactttattttcactcttcaaaggcattctaactgcctgaaaagcaaagtgacagttcaagtgagtgtgctgagctggaatgttgcaggaagtcagggaccccaaacggagggaccagctgaagccatggaagaagaacgtggattgtgaagatttcatggacatttattagttccccaaattaatacttttataatttcttatgcctgtctttactgcaatctctaaacataaattgtgaagatttcatggacacttatcacttccccaatcaatacccttgtgatttcctatgcctgtctttactttaatctcttaatcctgtcatctcctaaaccaaggcggatgtatgtcgcctcaggaccctgtgataattgcattaactgaacaaactgtagagtatgtgtgtttgaacaatatgaaatctgggcacacaccttgaaaaaagaacaagataacagcaatgtttaggaaacaagagacataactttaaactctgacagccccagtgagccgggcggaacagagccgtaggagccgggtggaacagagccgtagttctcttctttcaaaagcaaatgggagaaacatcgctgaattctttttctcagcaaggaacatccctgggaaagggaatacacgcctgggggtgggtctctgaactggcccccttggcgtggccgtcttctatggtcgaggctgtaggggtgaaatagaccccagtctcccatagcactcccaggcttattaggaagaggaaattcctgcctaataaattttggtcagaccggttgctctcaaaaccctgtctcctgataagatgttatcaatgacaatggtgcccaaaacttcattagcaattttaatttcgcctcggtcctgtggtcctgtgatctctccctgtctccatttgccttgtgatattctattaccttcggaagtacttgatgtctgtgacccacacctattcgcacactccctccccttttgaaagtccctaatagaaacttgctggttttgcggcttgtggggcatcacggaacctaccgacctgtgatgtctcccccggatgcccagctttaaaatttctctcttttgtactctgtccctttatttctcaagccggctgtcgcttagggaaaattgaaacgaacctacgtgactatcggggcaggttccccgatactggaactctccagtgtcagtctattcacattcatacaggtgatcttctggtgagagtggacttcgacagcaatatcacagcaatgtggaacagatgtaataaaataaaagatgaaacactgcttttcaggaaaatgagctaatctttcttactctgtgtatgtgattatgtgatggttgtaagttttaaaataaagactaggccaggcgcagtggctcacacctgtaatcccaacactttgggaggctgcggtgggcagatcacgaggtcaggtgttcgagaccagcctggccaacatggcgaaaccccatctctattaaaaatacaaaaaaaaattaggtcatcgtggtgggcgcctgtagtcccagctacttgggaggctgaggcaggataatcgcttgaactggagaggtggaggttctctctgtcacccagggtgtagtgcagtggcataatctcaactctggggttcaagccttcgtctcccaggttcaagcgattctcttccctcagtctcccatgtagctggaactataggcacgtgccactatgcctggctaatttttgtattttcagtagagacagggtttcaccatgttggccaggctagcttcaaactcctgacctcaggttatccacctacccactttggcctcccaaaatactagcattacaggcgtgagacaccatgcctggccattgcgtgctttttttttttttttttttgaaatgtagtcttgctctgtcacccaggctggagtgcaatggcacaatctcggctcagtgcaacctccacctcccaggttcaagcaattctcctgcctcagcctctcaagtagctgggattacaggtgcccgccaccatgcctggctaattattgtattttttagtaaagatggctttcaccacgttggtcaggctggtctcgaactcctgacctcaggagatccacccgcctcagcctcccaaagtgctaggattacatgcgtgagccactgtgcccggcctaacatccctctttttaaacaaccagttattctctttagaacaaaaatttaccatacaagatcctttcttatatacaagctgtttgtctatgtaatcttttttgcatagctagggtgtgacatattaccaaacccaatatgaagtcttagcagactcagtgattatagactatcatccctgctataaagataataattaagcaatatactacagcaattgagattctttgtttgatactccactctggggggtgctacagtatataatcccactgcaaaaagtaaagtgagtataacaattccctgcccagggcagtggttcacgcctgtaatcccagcactttgggaggccgaggcaggcaaatcacctgaggtcaggagttcgagaccagtctgaccaacatggagaaacctcgtctctactaaaaatacaaaattagctaggcatggtggcgcatgcctgtaatcccagctacgcgggaggcaaaagcaagagaattgcttgaacctgggaggcagagtttgcagtgagctgagatcgtgccattgcactccagcctgagcaacaagagggaaactccatctcaaaaaacaaaaacaaaaacaaaaacaaaaaaaagacaattcgcacaagggtggtgtagtagataatttctatctaaaattttattcaccaatttatagaatttcccttttggggtctatgaagttacaaatgtaatcccataaataatcaaaatttccctgcaaatatgcaccaaaaagaagttataatagttgatggcaaatcttgagaggaaaggtaggaatgactgaaagtatttggtaaggtaagaatgggactgagtagaaggagtaggcctcacttatgtactcatcttttataatttttatatttcttcacattaatatctgggactttcctctaggctgttcagggttgctccctcagctttccaggtttaactgagtatgatgtatccaagagtcaattcctgtaactttcattgcaaacagggttcaaagaagaacagtgaaaggtccttcccagtttgcgcttagggagggagagagagagaggggagagctttcaccaatatcaaatctgggctaaatgaaggtgttcttattttctggggttgagactctgctaaatgtgttaattcctgctgaaagtgagcaagagaggttacatgcttaaccaattcagaggtttcctggtctaatagaaaccattgtaagaaaaggccattcatacagcatcttgaaagggctcagacctaactttgaaggggtatttcttacttgcagtaaagccatggaaagaaaagtaacccaagaaaggtgagttttttggggacagttttttttttttttttttttgagacagagtttcactcttgttgcccaggctggagtgccatggcatgatctcggctcactgcaacctccctctgcctcctgggttcaagcgattctcttgcctcagcctcccgagtagctgggattgcaggaatgtgccaccacacctggctaattttgtatttttagtagagacagggtttctccatgttggtcaggctggtctcgaactcccgacctcaggcgatctgcctgccttggcatcccaatgtgttgggattataggcgtgagccactgcgccctgcctgagactgggctatctctcaaggttatgctttccagccctcaggatggccacagtcagataggtattaggcccatccggcctaatacatgttttaacatagaaatatcttcccataatatacaagtttttcaaagaatagatgaatgtatttaaattaactttttaaaatgtagcatagattcacaatggaatactattcagcctttaaagacaagatgtcttttaacaatattatttgtcttctctacctttcctgagtactgggatctttaagcacaatggagataatactatattcctagtgcttttgagacccactgtgtgatggctgccttaaatgaggtgccattgtcactttggaggtacttaggtagacaaaagtcggtagtaatttcattaattaacacttttattaccgcagaggtcttttctgtatggcatggaaatgcttctacccaatttgtgaaagtattaattccaggaggtattgcatgccctctgtctttggcatgtgggtaaagtctatctgtcagtcttttcctggttagcttcccatcctttggatttgagaagaaagaagtggcctgttgagattatctttaagacagactttgcaagcattaacctgtttgactgtttttaatagactctttcctggccgggagcagtgggtcttgcctgtaatcccagcactttgggaggccaaggcaggctgatcacgaggtcaggcattcgagcccagcctcgccaacatggcaaaaccccgtctctactaaaaatacaaaacaaaaacaaaaacaacaaaaaccaaaaaactagccaggtgtggtggcgggcgcctgtagtcccagctacttgggaggctgaggcaggagaatcgcttgaacctgggaggcggaggttgcagtgagccgagatagtgccactgcactccagcctgggcgacagagtgagacttcatctcaaaaaaaaaaaaaaaaaggtatttcctgaaaacaatctctgaggacactgacaaattttattctttcccaagtaaaatgtttgatggattttaaagacttttccattggctggaggctggcaagtggaatttgccattctctgactgtggccatcctgagggctggaaagtgtacccttgagagatggtccattttatcttttcaggactactaaagcttaatttcttttatggagccttcatagattagaggggtttcaagtgtgttgatgcctggaggcttcattgtaactgactaggctgcctgattagctaacttgtttctttccactattttatctgttccctctgaaggggtgggttgcccctccacacctgtgggtgttacttggaaaagaaagagacacagagacaaagtatagagaaaaaaaagggggcccaggggaccagcgttcagcatacagaggatccacgccggcactggcctctgagttcccttagcatttattgatcattattgggcatttcccagagaggggcatgtggcaggataatagggtaatagtggagagaaggtcagaaggtaaacacgtgaacaaatgtctctgcatcataaacaaggtaaagaaaaaagtgctgtgcttgtgatgtgcatatacataaacatctcaatgccttaaagagcagtattgctgccagcatgtcccacctccagccctaaggcggttttcccctatctcagtagatggaatatacaatcggctttacaccgagacattccattgcccaggaacgagcaggagacagaagccttcctcttatctcaactgcaaagaggcgttccttcctcttttactaatcctcctcagcacagaccctttacgggtgtcgggctgggggacggtcaggtctttcccttcccacgaggccatatttcagactgtcacatggggagaaaccttggacaatacctggctttcctaggcagaagtccctgcagccttccgcagtgttttgtgtctctgggtacttagggagtggttgagattagggagtggtgatgactcttaacaagcatgctgccttcaagcatttgtttaacgaaacacaacctgcacagcccttaatccatttaaccctgagttgacacagcacatgtttcagggagcacagggttgggggtagggttacagattaacagcatatcaaggcagaagaatttttcttagttacagaacaaaatggagtcttagcctatgtctacttctttctacacagacacagtaacaatctgatctctccttcttttccccacaccttctgatgtctcttacattgctatttcttatggaagaaaaactgagaaaaataacctgttaattttatgattgtctccattttccattggctttttgcactcctaatattggagtggtgcaggggctgttacagggtttgaggaggccctgcattttcagattaataatggcttctagtcctttcctagcctctggctttagcggatattgttgctggttaggaaaaaaggtgggatccttaagatgggtctggactggcctagtagttatagtttggcatatttttccttgaagtgcccatacttttggattaacattagcttccaccagggaaagacaaagagtttgttccagggcttattataaagatgctgaccccatgttaactaaaatttctctacctaaagagtgggactttctggaatgattaacacacttgaataaacctttcggtttttgttttgttttgttttgttttttctgagactgtcttgctctgtcacccaggctggagtgcagtggcatgatcttggctcactgcaacctccatctcctgggttaaagcgattctactccctcagcctcttaagtagctgagattacaggcacccattaccatgcccacctaatttttgtattttcagtagagacagggtttcactatgttggctaggctggtcttgaacttgcgacctcagttgatctccccacctcagcctcccaaagttctgggattacaggcataaaacaccatgcccggatagaataaaattttaaaatagtctttttgttgctgttgttatctaagtaaacaaagatatcacctgcaaatcataattagctactttataattgtacttattacaaatattaactaacttatcttttttcggcttaaattttttatgtaccattttatacattcacacacatataaaagtgaaaacatattcaatattcaattttttgttaatctttagtaaaaatgagtgttaaaaatattttttttttgaaggatttttattgttgtactcaagaatgttatctctggaggcaacattgcctgtattttaatattaactctgctattgtgagcaagtaatttctctctgtgcctctatttcttcctctgtaaaatgagaataataatacctatgttattaagttactgtgagaattaaattcattcacatatagtgttatagttagtgctcagtaaagattagttattaataaaatatgtacatgctgaattaaattaagacttccttttttgagatggagtttcactctttttgcccaggcaaatggagtgcaatggcacaatctcagcacactgcaacctccgcctctggagtcaaccgattctactgcctcatcctcctgagtagctgggattacaggtgcccaccaccatgcccggctaattttgtatttttagtaaagacagagctttaccatgttggccaggctggtctcgaactcctgacctcaggtgatctgcctgccttggcctcccaaagtgctggatttacaggtgtgagccactgcgcctggcctaatacatgttttaacaaagaaatatcttcccataacacacgagtttttcaaagagtagatgaatatatttaaattaactttttaaaatgtagcatagattcacaatggaatgctattcagcttttaaaaagggtaaattccaacatttagacaaataaagacaaatactgcatgatctcatttatatatagaacaaaatttaactcaaaagagtagaaagtggattaatggttaccagaggctatgggtagtgaaaaggaaataaaaagttgtggatcaaaaagtacaaagtttctaatagacagggtaaataggttttgagatctgttgcacagcagcatgatcatagtaaacaataatgcattgtatatttcaaaataactaagagtaaatttcaaatgtctcaccacaaaaaatgatatgtaagcaagttgatagatatgttatttaacttaatcactccatctatttatctatctatctatctatctatctatctatctatctatctattcctttttgtggagaacagggtctcgctatatttcccaggcaggtctcgaactcctgggctcaagctatcctcctgcttctgcctccctgagagctgggattacaggcgtgagccaccatgcctcgcaatcactccatattatatacatatattcaaacatcacatttaccctataaatgcatagaactctgatttgccaataaaaaatactattaggctgggtgccgtggctcatgcctgtaaccctagcactttggaaggctgaggcgggtggatcacctgaggttgggagttcaagaccagcctgactaacatggtgaaaccccatctctactaaaaatacaaaattagctgggtgtggtggcgcatgcctgtaatcccaactactcgggaggctgaggcaggagaatcgcttgaacctgagaggcagaggttgctgtgagccaagattgcgccattgcactccagcttggcgacagagtgagactccatctcaaaaaaaaaaaaaaacaaaaacaaaaaacaaaaacaaactattaatccatttttactaaaaaaaagaaactttaaaaaattgggctagataataaagtgtcttatcttaaatttccagaaaatatatacacgtattttttatttcagatagcttgcacatttagtgatgtaggtaagtaaacttttaatatcatgaatagtctgaaccccacactcaggataaaatattttgattatttttttctttttttgagatggagttttgctcttgttgcccaggctgaagtgcaatggcacgatcttggctcactgcaacctctgcctcccaggttcaaacgattgtcctgcctcagcctcccaagtagctgggattacaggaatgtgccaccatgcccggctaattttgtatttttagtagagatgggttttctccatgttggtcaggctggtcttgaactcccgacctcaggtgatctgcccccctcggcctcccaaagtgctaggattacaggcgtgagccactgtgcccagctggtttttcatgttcaaaataatatagtactttaaaagacagactctaaagcaactgtttggagtctctaaattgtctctaaatatttaatgatttctttcacttgttaaaggaaaacattatttaaattttttttttttttttttttgagatggagtcttgctctgtcacccaggctggagtgcagtggcgcaatctcggctcactgcaagctctgcctcccgggttcacgccattctcctgcctcagcctccctagtagctgggactacaggtgcccgccaccacacccggctaattttttgtatttttagtagaggcggggtttcaccatgttagctaggatggtctcgatctcccgaccttgtgatccacccgcttcggcctcccaaaatgctgggattacaggcgtgagccaccgcatccggccattaaatatgtacttttaaactacatttaaatttatcaaatgaacataaataattacttggtaataagaaatttattaaacaagtagatgaggaaataatttgcctccttttctaattttataactgacaaactctccgtatttaagtgcttacttatctagagttactggagtgctaaagagaagtactcaatgagaaatctttccataatattcatatccatgctgtatgtgaatatatgggaatttgccaaggataatattaaaaacattcaagcctcagactgatgaggatgaacatgggttacaaaccactgatatggccagtttgttttcaggcttaacattgatcatgatctaacagaataaaaaaataagagttaataaatttcctgtatacttactatgtgctgggcattgtttggccacctttatttgtatcaattgctttaattttaccaaaaccctaggagttatgcagtattatcctcactccacagctgaagagtcaagcacagagaagtcaaaacagtccataagtggcagaactggaatgcaattaggaaccacctgataccgagtttcaactttaaccattatactcaacactcttttacccaatgcttgtttccattcctgacataacattttggctttgaaatttctaatttagtaaaaacaaagaagaatttaaaaatcactcttttttaccgttagatagtatgtagaacttgatgttttgtttaaaccacctattactaagcctaaaccaaatactttggtaaatgggttctaacagtgatatacttctcacgacttaaaattgccactaattttacttttgaaatatattagattttatattagaagctaggatgagcctattatgatacagaaaatttgtggtctgcaggaacatcatcattcattgcatggtctacagtttccgaaaatttcagaaacactaacataagaatacttttctgattgaataatttaaggatattaagtcttctcagtgactaaaatgaaatagagttactaatcagacacaatgtggttttaagtgttatttaatgaacacatgtaaagtttcttttaaacacatgttaacaacttatttctattgatttttcacttctattataaaaaatattaaaatgtctgtgactacaaacgtataaaattcattcaaatctaaacagtgctaatcttaaaagttctgtatacttagaattatagaaagcctattctctatttatacttagaagataaaaaaattgcttttcagcaaacccagtggagcaatcataagctcactatcataaggtattataatattaatacaatcatctagagaaaacttttaggtatctggatgttcaagttgtttaacttatatgattcagaaactatgatttatttatttatttaggagatggagtctcactgtgtcgcccaggcaggagtgcaatggcacaatctcggcttactacaaactctgcctcctgggttcaagtggttctcctgcctcagcctcccatggtctcaaactcttgacctcaggtgattcaaccaccttggcctcccaaattgctgggagtacaaaagtaagccaccatgcccagcccagaaagtatacatttttattaagtataaaaaattaaaatatgtcaatttctttttctcagtctctaaatactgtcattatttctagttgacataacaagagaatttaaatgctgtggctgtagaaactagaaatgtgggctgggcgtggtggctcatacctgtaatcccagcactttgggaggctgaggtgggtggatcacctgaggtcaggagttcgagaccagcctggccaatgtggtgaaaccccgtctctactaaagatacaaaaattagccgggtgtggtggcaggcacctgtaatcccagctactcggaaggctgaggcagaacacatgtgtttaaaagctactcggaagcttccctgaggcttgaacccgggaagcagaggttgcagtgagtcgagaatgcgccattgcactccaacctgtgggacaagagtgagacttcgtctcaaaaaaaaaaagaaactagaaatgtgatggttgactctggtttactttctgcctttttattttatagaaacaaagcagcataaggaagggcagaaataatacatcttgattgcaaacacaccagtgcccgtctagagagaatatatttctgagcatattaatttgaaattcacggcatcttttgtagaagtacagactagtatatgacaaacaataaacacaaataaaaatttaagactgcaatagaattagaaaagtattctaaaaataaattctgatcaattattttttttccaccagaatagttgtgatgaaatggttgtggcagtgtgatcttaagtaaccaacactctcatcattcttgggctatggacattagactttgatgccttttttctttataaaaatattttcttttcataagtcaggaatttaacctgatctgcacacccactcattttcaaaaatagtttattctaaaaaagaaatgcggtttcttttttttcttttttttttgagacagagtcttactctgtcacccaggctggagtgcagtggcacgatcttggttcactgcaacctccacctcccaggttcaagcaattcttctgcctcagcctcctgagaagtgtgcaccaccacacctggctaattttgtatttttagtagagctggggtttcaccatgttggccaggctgctcttgaactcctgaccacaagtgatccacccacctcggcctcccaaagtgctgggattataggcatgagccaccacacccagcctcagaaatgcggttttaaaaccacatttttttctaaaaacagtacagtaacaaattaactcgatagtctagtgtacagttaattaattaaaaataaagatgtggagtcatttattttaaccacacagttaagaataaaacatttttcgggctaaaagctttcagagatgttagcttataggatgtggggagacctggcatagaaacattcactcttatgcccaaagggaaaataattctgtgtctttcaacccaatgctaactatgaaccaagaattggaaaaatgtaacatgtcattataccacaaggcattttattatttttattatagattcaggtgtacatgtacagatttgtagcataggtatactgcatgttgttgaggtttggacacttaataatcccattgtccaagtagtttacagtattacctaatgagtaatgagtaatttttctgttggttttttttttttttttctttcctgagatggagtcttgctctgttgcccaggctggagtgaagtggcatgatcttggcttactgcaacctctgcctcccgggtacaagtgattctcctgccgcagcctcccaagtagctgggattacaggcacctgccatcatgcctgtctaatttttgtatttttagtagagacagggttttgccatgttggccaagctggtctcaaactcctgatctcaagtgatccgcctgccttggactcccaaagtgctgggattacaggtgcgagccactgcacatggcccactttttgactttttttttttttctttttgagacagagtattgctctgttgcccaggctggagggcaatggcctgatctcggctcactgcaacctccacctcccgggttcaagcgattctcctgcctcagcctcccgagtagctgggactacaggcatgtgccaccacgcccggctaattttctgtacttttagcagagacagggtttcactgtgttagccagactggtctcggtcttttgacctcgtgatctgcccacctcagccttccaaagtgctgggattacaggtgtgagccaccatgcccagccactttttactttttaataagagccattctaactggcgtgagatggtatcacattgccattttgatttgtatctctattgatttgggatgttgaacaattttttgcatgtttattggctgcttttatgtcttcctttgagaagtgtctattcatatcatttgcgtttttcttattaaattcctgatagattctatatattaacgctttgttgcatgcagtttgcaaacattttatactgtaggttgttttttttactttgtcaatagtttcttttacagtgcagctctgcagttgaattaggtgctaatttttatttttgttgtattcacttctaaggtgttagttataaatgctttctggaggccagtgtctagaagagtactttctaagtgctctaggatttttatagcttgaagtttcactgttaagtctttaatctatcttgagctatttggttttttatatatagtgagaggtaggggtctagttttcttcttctgcgtaagactaaccaattttcccagtgccatttattgcactgggagttattttctctttgttaatttctgttgactttgtcaaaaataagttgcttgtagaagtgtagctttgtttcagggctctctcttctgttcaattggtcattatgtatacttttgtaccagaaccatgttatattggctactgtagcttatagtatagtttaaagtcaggtaatatgaggcatccaagttgattcactttcacattgccttgggtttttggctttttaatttcttatatgaattttagaagattttatctgaattctatgaaaaatggcattgatagtttgatagaaacagcacttaatctgtaggttgcttcaaacagcatggacatttaattatattgattcttccaatccattagcataaaatgcttttttatttatttgtgtttaattttcttcagcactgttttgtaattttctttgtagagatattttatctacttgatttaatgtattcttaggtatattatttgtttgtggctattgtaaacagaactgtgttcttgattttgtcctcagcttgaatgttattggtgtacagaaatgctactcatatgtgtatgttggttttgtatggtcagactttgctgaagtcattttttagtcttaggggtgttttagtgaaatctataaagttttccaggtagagaattatttcacctgtgaagataatttgacttccttttttttcctatttggatgacttttatttcttgatcttgttgaattgctctggctaggacttttagaactatgttgaataggagtatttagggtgcatatttttttcttatttttattcttatggagaatgcatccagattttgcccattcagtatgattttggctgaagatttgtcatagatgactcttattatttggaggtatgtttcttctatgcctagtttattgatttttttttttttttgagatggagtcttactctgtcgcccaggctggagtgcagtggcgtgatctcggctcactgcaacctccgcctcccaggttcaagtgattctcctgcctcagcctccctagtagctgggactacaggtgcccaccaccatgcctggctaatttttgtatttttagtagagacagggtttcaccttattggccaggctggtctcgaactcctgaccttgtgatcagcccacctcggcctcccaaagtgctgggattacaggcgtgtgagccaccatgcccggtctttttttttttttttttgagacggggtctcgcagtcaccaggctggagtgcagtggctcactgcaacttcaacctcccaggttcaagcgagtctcctgcctcagcctcccaagtagctgagactgcaggcatccaccaccacgcccagctaattttggtattttttgtagagaaggcgtttcaccatgttggccaggatggtctcgatctcttgacctcatgatccacccgcctcggcctcccaaagcgttgggattacaggcgtgagccactgcactcagccttgttgataatatttttatgaatactggattttcttgaatgctttttctgcacttgtgataattatgattttttgcttatatatttttacaaggtgaatcacacttattgacttgtatatgaacatttttgcattcataaaataaagctcacatgatagtggcaaaataactttttgatttgcttatgaactcagcttgctagtttttttttttttttttttttgagatggagtctccctctgtcgcccaggctggagtgcagtggtgtgatctcggctcactgcaagctccgcctcctgggttcacgccattctcctgcctcagcctcctgagtagctgggactaacagtgccccccaccacgcccaactaatttttttgtatttttttagtagagacggggtttcactgtgttagccatgatggtctggatctcccggcctcgtgatccgcccgcctcggcctcccaaagtgctggaattataggggtgagccaccgtgccctgcccctcagtttgctagtattttgtggaggatttttgttttaatgttcatcaggaatattgacctatagtttttttgttgttgttctgtcttcactaaatcgtggtaacaagatgacaatggtgtttttttttttgtttttgtttgtttgtttttgagacagagtttcactcttgttgcccaggctggagtgcaatggtgcgaattcagctcactgcaacctctgcctcccaggttcaagcgattctcctgcctcagcctcccgagtagctgggattacaagcatgtgcccccacgcccggctaattttgtattttcagtagagatggggtttcttcatgttggtcaggctggtctcaaactcccgacctcaggtgatctgcccgcctcagcctcccaaagtgctggaattacaagcgggccaccaggcctggctgacaatggttttatataagttagggaggaatcacaccttgatttttttgaatacattcagtaggattagtaccagctcatctttttgcaatatatgttgtaaaactcagctgagaattcatctgatttagggctatttcggttgataagttttttattactaattcaattttattatacattttagacatttctgttttgttcaagatttttgtttctttctggttaaatcttgggtcatgtgaatccagtagtttatttattttctctgaagtttctagtttgcaagcgtagaggtgttcatagacgtatctgaggatgtttgtatttctgtggtattaattgtggttttacaactgtaacgtttaaattgatgctggataaaagttctagaaaagtcacagtccctcacaataaatctctgaaaagcataagtataaaaaaatgcactgcaagccaataaatgccacatataacttaaaaaaattcacagctaataacatactatatgaggtaatgttgtaagcttttactctaagagctagaataatacaaaaatgcccactttctccagtcttactaaacatagtactaaatgtccaagacaaacaaattagagaataaatcaaagtgtattattctgttctcttgcagctaataaaaacatacgccaaactggaaaatttataaaggaaagaggtttaaagaactcacaattcaacatggctggggatggcctcacaatcattatggaaggtgaaggaggagaaaagtcatgtcttacatggtgataatggagagcatgtgcaagtaaattgccctttataagaccatcagatctcatgaggcttattcactatcatgagaatagcatgggaaaacccactgccatgattcaattaccttccactgggtcttttctatgacctgtggggagtatgggagctacaattcaagatgagatttgggtggagacacagccaaataccataaaggcatccagatggaaaagaaaaagtgaaattattcctgtttgcagatgacataattttaggtatagaaaagcctaagaatttactaagaactactagaactaataaatttgttaaacttgcagaataaaaaaatcaatgtacaaaagtcaatagcagttttatacactaacaattatctcaaattgaaatgaaaaaagaaattccatctacaatagctgtagttaactatactttgaaataaatttagccaaaaagtttcaacaccttacaatctaaaaaacatttaagtaaaaaactaagtaatacacaaataaaaatacattactcattcatgaattggcatatatatatacatgtatatatatgtgtgtgtatatacgtgtgtgtatgtgtgtgtgtatctatatatagatgtatttgagacggtgtagcgctctgtcacccaggctggagtgcaatggcatgatctcggctcactgcaacctctgcctcctgggttcaagagattctcctgcatcagcctcctgaatagctgggattacaagtgtgcaccaccacgcctggctaacttttgtatttttagtagcgatggggtttcaccatattggccaggctggtctcaaacacctgacctcgtgatctgcccccctcagcctcccaaagtgctcagatgacaggcgtgagccaccgtgcccggccagcattaatatttttaaacagctgtattacacaaaatgatctacagatataatgcaacctctatcaaaatgccagttgttgggagcaagccccccaaagtctagccataaactggccccaaaactggccataaataaaatctctgcagcaatgtaacgtgtccataatggctgtaacgcccaagctggaaggttgtgggtttatgggaatgagggcaaggaacacctggcctgcccagggtagaaaaccgcttaaaggcattcttaagacacaaacagaagcctgagccatctgtcttaagggagtgttcctgctgcagttaactagcccaacctattcaattaattcgtcctatcccttcgtttcccataagagatacttttggttaatttaatatctatagaaacaatgctaatgactggtttgctgttaataaatatgtgggtaaatctctgttcagggctctcagctctgaaggctgggagacccgattcctcacttcacacctctgtatttgtgtgtgtgtgtctttaattcctctagcgccgctgggttagggtctccccaaccgagctggtctcagtagccagtgaaatacttaatataaattttgtaaaatatatgtaaaattcatatggtaccacaaaagacccagaatagccaaaggaataaaaaagtaaaaaaggctgaaagtatcaccctacctgactttgcaacatactgaaaaactatagtaaccaaaacagtgtggtacttcaataaaactggatacatagggcaatgtagctgaggagtgtggaaatatatccatgtatttacagctaattgatattagatataggtgacattttcttagagaaaggacagtatcttcaataaatggtattgagaaaactttcttttttcctttccttttttttttttttcttgagagggagttttgctcttgttgcccaggctggagtccatggcacgctctcagttcactgcaacctctgcctccacattgttcaagcttgcctcagcctcccgagtagctgggattacaggcatgcaccaccatgcccgactaatttttgtattattagtagagatgggatttctccatgttgatcaggctggtctcaaacttccaacctcaggtgatttgcctgcctcagcctcccagtgttgggattacagatgtgagccaacgcgtccactgagaaaactttctagccacatgcagagcaataaaatgagaccctcatctgataccatatataaaaattaactcaaaataaattagatattacaatgtaaggtctgacactctgaaaccactacaaaaaaaaacagagtgaaagacccataacattagtttgggcagtgacttttttgatataacttcaaaatcccagggaaccaaaagaaaaatagattaatcagattacttcaaataaaaaaattgctgcaaagaatctgagacaatcaacaggatcagacaactaaaaaatggaaaaaatgtgcaaatcatacatgtgacaacgtgttaatatcaaaaatatataagaatctcaaattacaatacaaaaagtactattaaaaatgagcaaaaggcttattttcaagaatagacatacatagtcaaaagatatatttaaaaatgctcaatatcaattattatcagggaaaggaaagcaaaaaaataaaaaaagatgagatatcaactcactcctgttagaatgactctgattaaaaagaaaaagaaaatgagtattagtaaaggtgtgaagaaaatagaatgcttgcacactgttggtttgaatgtaaatgagggcagccattatgaaaaacaaaataaagatttctttaaaaatttaaaatcaggccaggtgcggtggctcacgcctgtaatcccaggactttgggaggccgaggctggtggatcacgaggtcaggagttcgagaccatcctggctaacacagtgaaaccttgtctctactaaaaatacaaaaaattagttgagtgtggtggtgggttcctgtagtcccagctgctcaggaggctgaggcaggagaatggcatgaacccgggaggcggaggttgcagtgagccgagatcgtgccactgcactccagcctgggcaacagagcaagactctgtttcaaaaaaataaaaataaaaaaaaaattaaaaaaataaaaatttaaaatcaaactatcatataatatagcaatttcaataatggatacatatctcaaaataattaaatcagaatgaagaaatatttgcagaaataatctgcaagaaatatttgcagaatgaagaaatatttgtaacattcttcacaattgccaaaatacagaattaacacttcaacatctaatgagtacataaagacaacgtggtatatatacacaatggaatactattcatctttaaaataaaaaaatttattattttcaattacatagattaaccaaattatttcacttacatgattctagaaaaattaatctaactgaagtggagaataaaatggtgaccaccagatgccaacatatttggaaaaaagaggggtttagaaagatgtcagtcaaatacataattacagttgaataggagaaataagttcaaaaaagcttttgtactgcatggtgcctatagttcataacaatgtatttgtatttctgaaaaatgctaaaacattgtcatgtgctcttaccacaaaaatgttaactatgttaggtaaagcattaattacctagaatgaagcatttgacaatgtgtatatacttcaaaatgtcatgcttcacagaataaatgcacaatttatatattacagacggtatgaaagacactaaaagggcagctgtttcttatggtctcatgactggccactctgtgaacacagtaaacaagtttgcacgcaaaataatagaaaatgtttttatctaaaagctgccatgatcttcgaatgttttccagagaatatgaccaagaagttggctagagttaggtgactaaatgtaaaaactgtagactgaacttcacccactaaaaaaacatataaaactgagaaaatttcttcaaattgtaatatgaatatggaaaagaaatattactccaggtttcaaaatcacagaggtcattttactattttgcaatgtttaatgttcacacttacaaatagaagattttgcatggaaacgtacattgtggcataagtatactgtagaaaattaaattaaaagtttaatttctaagatatattttcaagcaaattttatatttgccacactttgtgtaagaatttaataagattattctttaacaaacagagaaaaacaacgctaaatgatttaatcctttcatctgtggacactgtatgctttttgttttaatttaactgatcagaaaattatattgatatgcaaaatctccagttaaaaccaatcttgcagtgcattaaaaataccgatttctcatcaaaacctacaatataccatgtgaaatgacatggtgtgaagagaacagtgagaaaactgtagccacagcacagcaaaaaggagggctgtgatgcatacacagctgaaatacacataataagacaaacaaaactaagacaattaggaaataaaagaagcacaattttttaattcagcaaaactgagctttgcagcctgaaaataaatgtcctctccacataaaaaatcaatgttatttctcacaattgatatgttccatctctgtcttgaagttacaaactaactccaacaggaatatttatggcttattataaagcatctgtgacacagaaagcactgtcatgtttgtttgctatatttatatataaaaacatcctcatgatttaggaagcccccctagtactcacctaaataaatgggctcaatcaatatttacttattttcattataaaaactgaaaggaacaaaaactaaaaaaagtaggcttatacagcgttctccaattaaaagaacaaaataaaatattctaacaacataaaatataacaatacactaattttgaaattaaatctaaattttttgcactaattttataaaaattatttttataatctctgaccagctcacatagcatcttatataaaataagagaaaaaaatgtaagacacaagaaaattatgggtctagcctaagaatcaggcaagtaaaaacaaaaatttgcatagggagattctgaattataagccatacaattttacagtaatcaattcaatacaaagcagagagtatggatttgttttcagcatttttaagtttttttagttttgcagtcatcatctaattaaaataatttgatttgtttcaatattgctcttctgaaactaggtagaaactcatactcgcaaagaaggcatttatttactccataatttttttaaacccaagctttatctttaaagtaatatatgtatatatttaactctgtgtaaatcaaaactaatagtctgtatgtgcttgcaggcagagaggcaacatgtttgaagaaaaatatataacaattttttaatgttaattcaggtctcagaaatgtatgcattttgtttatattgttttcttatgaccataaaagagaccctgtagccaacaacaatttaatgtacatttgaaaacaactaaaagtggctgggtgtggtggctcccacctgtaatcccagcactttgggaggccgagggggctaatcatggggtcaggagttcaagacaaacctggccaacgtagtgaaactgtttctactaaaaatacaaaaattagctgagtgtggtggcatgcgcctgtagtcccaactactcaggaggctgaggcggaagaatcacttgaacccagtaggcggaggttgcagtgagctgagaccacgccaatgcacccaggcgtgcacagcctgggtgacatagtgagactcgtctcaaaaaaaaaccgaaaagtgcagaattagtttataatacaaacaaatacaaacaataaatgctgcaggtaatgaatatttcatttacccatatgtaattattacatattatatacctgtatcaaaatatgccatatatgccatatttacacatactatgtacccacaaaaattaagaaaaataagtttaaataagaaaaaatgagtaataattcaacctacaggaataatattctctgacttatttgcaatttaaagccactggcaaaacagattactagaaatgttagtccattatcttattaaatagtgtatagttaccatcatttacctatacccttgagtaagatgggataagttaaatttaatggcataataatgcttcattgaatgcacgatggtcttaacatgttttttaaaaagcctgattaataagttcacacattatctaaaaattttaaaatgtactacattttattacataaaagtacaattggccaggcatggtgactcgcgcctgtaatcccagcactttgggaggccgaggtgggtggatcacccgaggtcgggagtttgagaccagcctgaccaacatagagaaaccccatctctattaaaaatacaaaattagccgggcatggtggcacatgcctgtaatcccagctactcgggaggctgaggcaggagaatcccttgaacctgggaggtggaggttttggtgagccaagatcacaccattgcactccagcctgggcaacaagagcaaaactctgtctcaaaaaaaaaaaaagtacaattagtaaaatgatataccagaaaattttttttctcaatataacacaggatatttatctgaactcctacctcatgcatcagtcaatattataaattaaccagaaagagcctctccacttacattttcatcttgcatcttacattttaatgtccttaactctttcactaaaaaaggtcgtaaataatgcacacctaataacaaagaatctctcatctttgatgcagcaacaattaagtcacatgctttcacatgtgaatacaataggaatgaagagcataacttgagttaaatgacattattcacttttcataaaacctaatttttttcaaaggatagtttgaatgtagttacaactctgcaaaaattttctacttcttataatgttatatacaaataattcatttaccaactttagttttagattcttttctatactcagcaatctgatttagtgtaatgcctgaagtgtcagtgccttaactatttctactgtgaattatctgatatttacatagaattttggattaaatattttttcatatttactgcatctgcaaaaatagattttagtatgaaccctctagtgttttctaagctgtcgtttttgaaaaaatgttttcccaaatttattacatttgcagggtttttctccaatataaatttccttatgttgcacaaagtttaagcaactgctccatggttttcctctagcacaaaatgtgtacaatgagatctgtgatacaagtaaaggtaccacaaccctccttatgttcataatgtgtgtcttcaaaatgaatactcttcactttagaggcttatattttctgaaagatttttgacagtaattgcatgtataatgcttttattaagtatgaaatctctgatgttgagtaagatgtgaacagatattaatggctttttcacattctgtatatttgaaatttttttctagtacaaatgctttcctgtgcaataaggtgtgagcattggttaaaagttttgccacattcttcacacttgtaggtttttttttagtatgaattatcttatgcacaatcaagtgtgacaacttttaaaggttttgttacattcttcacatttctaagatttctcaccagcataatttcttttatgtttagaaaactttgaagtgttttcaaaatcactgttacatcttttaggtttgtagagtttctcaccagtatgaattttcttatgtccagtaaggtttgaggactggttaaaagctttgccacatttttcacattggtagggtttctctccagtatgaattctcttatgtctagtaaggtgtgaggactggttaaaggctttaccacattcttcacattggtagggtttctctccagtatgaattaccttatgtgtagcaagatgtgaggaatggttaaaggctttgccacattcttcacatgtgtagggtttctctccagtatgaattttcttatgttcagtaagttttgaggatcgatagaaagctttgccacattcttcacatttgtaggatttctctccagtatgaattctcttatgtgtagtaaggattgaggactggttaaaagctttgccacattcttcacatttgtagggtttctctccagtatgaattcttttatgtgtagtaaggtttgagaactggttaaaggctttcccacattcttcacatttgtatggtttctcttcagtatgaatattcttatgttcagtaaggtttgaggattggttagaagctttgccacatttttcacactggtagggtttttctccagtatgaatgctcttatgtctagtaaggtgtgaggacttgttaaaagctttgccacattcttcacatttgtagggtttctctccagtatgaattatcttatgtgtagtaaggtgtgaggactgcctaaaggctttgccacattcttcacatctgtagggcttctctccagtatgaattatcttatgtctggtaaggtgtgaggactggttaaaggctttgccacattcttcacatttgtagggtttctctccagtatgaattatcttatgtctggtaaggtgtgaggactggttgaaagctttgccacattccttatattcattgagtttctctctggtatgaattatcttatgtgtagtaagggttaaggactgattaaaggctttgtcacattcttcacgtttgtagggattctctccagtatgaattattgtatgtgttgtaatgtgtgacgacaggttaaaggctttgctacattcttcacgtttgtagagtttgtctctagtataaattatcttatgtgtagtaaggtttgtgaactggttacaggctttgccacattcttcacatatgtacgatttctctccaatatgaattcttttatgtttagtaaagattgaggatccattaaaggcttttccacagtcttcacatttgtagaaatttactctagtacaaattattttatgttgagttaggtttgaaaatatgcaaaatgatttgccaaattctttatatttaaaaggtttttttctggtgtgtcttaccttatgtccatttaaatttgaaaatttatgaaagattttcatatatttatcacattgaaatattttgctctgggtagttggcaaacattggttaagtccattataacctcctttttgcactttgcactcatccacacttttacttaactgtaaattctcatgttcacattttccatatcttcttggtgtcactttttggaaagaatcttttatgttctgctctggtgaaaagtcttgggcaaaatgagaacaaataactgaaagaaataaaaataacaaatgactccacttgataagactctaaatatactttacaaatccaacctatacaattatacaaattacataagcaagatggtatagcaaaataccaaaggccctaattttttttttttttttttcctgagacggagtttcaatctgtcacttgggctggactgcggtagtgtgatctcagctcactgcaactgctacctcccaggttcaagcaactctcctgcctcaggctcctgagtagctaggattacaggcatgtgccaccatgcccagctaatatttgtatttttagtagaaacggggtttcaccatattggccaggctggtctcaaattcctgacctcgtgatctgcccacctcagcctcccaaaatgctgggattacaggcatgagccaccgtgctcggcccaaaggccctaatttcttaatagaaatataaatgtaacaaaaacatattgaccaaaatacatttgtggaaaatttataaattagttaagtgtgtgcaatgacccaggtgagcagaatgcaaagagccacatagaaagaaaataaaagcctgttacatttacccaacatagatctttctgctccccaatataacataatgcctttaaaagtaaattgccaacttcaattgttttgcatacagcagcacacctgagagtggataatttataaagaaaaaaggttggcagggtgcggtggctcatgcctgtaatcacagcactttgggaggccaaggcaggcaaatcaactgaggtcaggagtttgagaccagcctggccaacatggtgaaaccctgtctctacttaaaatacaaaattagccaggcatggtggtgcatgcctgtaatcccagctactcgggaggctgaggcaggagaatcacttgaatctgggagacggaggttgcagtgagccaagattgtgccactgcagtccagcctaggtgacagagtgagactatgtctcaaaaacaaaaaaaaaaaaagaaaaaggagaaagtttatttggtacacagtttggcagactgtacaagaagtgcatgccagcatcgacttctggtgagggtctcacaaagcttacaatcatggtgaaacacaaagagtaattatgtgagtactatgtgaacatatcacatggtaagggacagagcaagtgtgaaataaagaagccaggtaattttaatgagccagctctcatttaaattaacagagggtaaagtttttgattaccaagagggtgatgccaagctattcatgagaaatttgcccccatgactagaacacctcccaccaggttctgcatccaacattgaggactgcgttgcagcatgatgtttggggaacgtgaacattcaggttgtaccatagataaactaggcttaacagacatgtaaactactttccagttaaaagcaagaaaacacacaatattcttatttgcacctggtgtattctgttaggatacacaacaagtcttattaaatttaggaataccaggtgggtgctgtggctcatgcctataatttcaacactttgggagaccaagatgggaggatctcttggggccagaagtttgagaccagcctaggcaacacagtaagactccatccctacaaataatcaaaaaattagccaggcatggtagtgcatctctgtagttccagctagtcaggaggctgaggtgaaaggagcacttgagccctgaaggttgaagctgcagtcactgcactccagcctgggtaacagaaagagatcctgtctcaaaacaacaacaacaacaaataaatgtaagaaaataaaaattgtacactaaatgttttctgactaagactgaatgaaactggaaattgagaacacaagtaaaactggcacatccaaatatacatgaaaataacacatactcttcaacatagttttactcaagggtcaaaaaatttaatttttcaaagatgtctgtataacttacagtgatgaatatattcaatataatttctataaaaatccccaaagtggccgggcgcggtggctcaagcctgtaatcccagcactttgggaggccgaggcgggcgtatcacgaggtcaggagatcaagaccatcctggctaacacagggaaaccccgtctctactaaaaatacaaaaaaattagccgggcgtggtggcgggcacctgtagtcccagctactcgggaggctgaggcaggagaatggcatgaacctgggaggcggagcttgcactgagccgagatcgtgccactgcagtccagcctgggcgagagagcaagactccgtctcaaaaaaaaaaaaaaaaaaaaaatccccaaagcacaagttttacaagaatattgtttaaaattttaaaatttgattataaactatagccaaacattcatgaaaaagaacaaagaggtgttatacttctggattttaaaaaatattaatagctacaaaaacaaggtggtactgacacaaagacagataaacagattaaaaaacagaatagagagcccagaaataaactcctcagtatatgattaaataatcttttacaactttgccatgagcacacaatagagaaaagacaatctcttcaaaaaatcatgttgaaaactggacaccaacactgataaagctggattctttgaatcatatacaaaaaatattttaaataaaatacttaaacatataaaaataactaataaatctcttagaaaaaaagagaaatgacatgacgttgttcttggcaccattttttttgatatgatattaaatgcatgagcatcaaagaaaaaagtaactacactacaaaatttccacacatcaaaaaaacattagagtgacaatgccttgtagaaaataagtaaaaatatttgcaaattatatgtgataagagttaattgcagggagctaaaggcccgagggtcatgaccaactcagcattccactgaaggctatatgatcaaacagcaaactgtttatcatgaatgcaggatgtgggcaaactcacatctgtgcctgccaccagaaggtttgctgagggcagtcactccctggtgccatgctccttgaggttatctactggaacatctggagactactgttcaaagaatgcagttgtgcaagcctgcactaagtaaagcagctgacagacaaccacccccttctccctatctcctttactcaataaatacaaaggggtatagaagttcacggcccttattcactagaagcaaggagccccctgaccccttcttccaaatacactcttttgtctttgtctttattcccacgttcatcctcctttgttcagtccagcaaggtccatggcagttaatattgagaatacataaacaagtcttaaatggactaataattgaaataaattttaatcaaaaaaatacaaaaattggaaaaagcatttgaaaagacacaggaaattacatttgtagagaaatgcataaaaatcacgtgaaaaaaactcaaaccaattagaatggccactatcaatttttttaaaacattaaatctgttgatgatgaactgaaaatccgttatttgttggtgtaaaacaaggatgcagccactgttttaaaatgttatgttacccaaataattaaaaatggaatcattaaatacaataattcaatttgtaaatctatatgcaaactctgcaatgcaggagctagaaggcatatttgaatattgatgtttactgtaccagtattcacaaaagccaaaagactgaagcaaccctttcttgacttacaaatacatcaaaaaatgtaacatataaatacaatggaatattattcagccttaaaaaaaatcttgtcacactttaagacaaacttcgagaattattatgtcacctgaaataagccattaacaaaatgatggctactatatgatcccatttataggagatatcttaagtagtcacgctcataaaaacagaaagtagaaggatatttgtcaagggctggagagagggtaaaatgttcagctgttacttaatggatattgagttttagttttattagatgtaaaatttttaaaagtcttttgtataacaatgtgaatacacttaacatgtctgaaaagtacagcttttttctgagacagggtctcattctatcacgtaaggtggagtgcagtggcacaattatggctaagtgtagcctcaaattcccagactcaagtaatcctcctccctcaatctttcaaagagctgggaccacaggtgcacacaaccatgcctgggttaaaaaaaaaaaaaaaaaatttgtagagtgggaatctccatatgttgcccaggctggtctcaaacttttgggatcaagcaatcctcctgccttaagatcctcaaattctgggattacacatgtaagccacaacctggaatgtacacttcaatagatttaagacaatacattttatgttatgtgtttttacaattaatttttctcaaaaaaaatctgaaaaaattcagaatcataaatcttttcataaattaccttcaaatcacaaaagtgtttgtctcacacagagcaaatacatattcatcattaaacacatggtgaaaataaaactatttccatgactactcaattagacaagataaaacaatcactgaaaatcaactaagaaaaaaaaaaaagggccgggcaccgtggctcacgcctgtaatctcagcactttgggaggccgaggtgagcggatcacctgaggtcggaagttctagaccagcctggtcaacattgtgaaaccccatctctactaaaaatacaaaaaatatctgggtgtggtgacatgagcctgtaatcccagctactcggtggctgaggctggagaactgcttgaacccgggaggcagaggttgcagttagccaagattgcgccattgcactccagcctgggcgacagagtgagactccaactcaaaaaaaaaaaaaaaaaaaaccaaaaaacaactaagaaagaatatatacaagataagtcataaccaaagctgtggttatatttacagataaacacacaaacatatatactctcattgtgatagacatatggctgatgtacctcttaagtaaaccccacattgacttaaagtgtacaaacagaattgcaaattgtctaaaattataatacatatgtaaaactaaaaagcacaagaaactaatattaagaaacctacactaaaaaaaacacactagtaggccaggcacggtggctcacacctgtaatcccagcacttagggagactgaggtggacaaatcacctgaggtcagaagtacgagaccagcctggccaacatggggaaaccccatctctactaaaagtactaaaattagccaggcctggtggcatgtgcctgtagtcccagctactcgggaggctgaagtggtaggttcccttgaacatgggagctgaaatcactccactgcacttcagcctgggcagcaaagtgagaccgcatctctaaaaaaaaaaaaaaacacccaggcgcagtggctcacacctgtaatcccagcactttgggaggctgaggtaggtggatcatctgaggttgaaggttcgagaccagcctgaccaaaatggagaaaccctatctctactaataaaagaagtacaaaattaaccaggcatggtggcacatgcctgtaatctctgctactcgggaggctgaggcaggagaattgcttgaacctgggaggtggaggttgcagtgagccaagactgcgccattgcactccagcctgtgcaataagagcaaaactccatctcaaaaaaaaaaaaaaaaaaaagatctggtttgcaaaacgatgtaccattaagaatttatctaaataggctgggtgcggtagctcacacatgtaatcccagcactttgggtggctgaggcaggcggatcacctgaagttgggagttcaaggccagcctgaccaacatggtgaaaccccgtctctactaaaaatacaaaattagctgggcgttttggcacatggctgtaatcccagctactcgggaggctgaggcagcagaattgcttgaactctggaggcggaggttgcagtgagccgagattgcgccattgtactttagtctggcgacagagtgagactccgtctcaaaaaaaaaaaaaaaagaaaacaaaaaaaattctattctctagataaccgtaatatgtgactgtgttcacagaaggcaagtattttgaataactggcatgtgctccatggcagtaaaatttcaaaggaaatggagtgtaatcataaacagaagattctaatgagaaacttttaatcaataagcatttaaaagaaactagagacaattttatttatttatttatttttttgagatggagtcttgctctgtcacccaggctggagtgcagtggcacaatctcggctcactgcaacctctgcctcccgggtttataccattctcttgcctcagtctcctgaatagctgggactacaggcgcctgccaccatgcctggctaattttttttgtatttttagtagagacggggttccaccatattagccaggatggtctcgatctcctgacctcgtgatccgcccaccttggcctcccagagtgctgggattacaggcgtgagccactgcgcccggcctgaggttggaaaattgcttcaggccaggatttcaaaaccagcctgggttatgtagcaagacccaatctccaaattaagtgcctttaggagagctttgagatccagggagggagttgtgaaactgctaatgcccaattctgaggagtgctatttttcagaaggcaggtggcaaactacagaactcctatttttcagtatagaccaggaaatggactacccaacttggtcttactgatcattctgaagttactctgtaatcatctcagacttttcccagccacagtctgtaagaggtcacataccctttcagaggccttgagaaagacacccacttatagccatgcagcaggcctgcagaccttggcctttactgtggtccttaaagcagttcaatgactcagtttcacatccaagccacagttcacagccagttctgcctatgttaaagcccactgagtgacctggaaaaatcctctctgatacacagtgaatgccatactcatccacattcttaaataagactcaaccatatacacagacctgactgcagaaacctgccctagtgactgccctacaggtcaaagtcttgagagaaattcagtctgtctaaaaaataaagtgttaattacaactacccaagccccttgtaacaagccaactaaaggtggaccctagtgcagacccagcagccttatgaccaagctacatgccctctccactacaaacccagagggcatctcattaccctgggggcccaacaaaagacctttaccttctgaaaacaggttataaaaacttgaagaggcttttgctttttcaagtttaaagacactaatacaaaactatattttgcctatcgtcaatgcttctcttttaacaaagaactgttagtacgtggcaaaagaattagtcaaaaaaatgaaaaagagccattgaaattgaagacaagtaagtaaaaagttgctggttgcagatcatatgatagtatatgtgtatatatatagagtacattaaatcctgtctaaactaataaatacactcagtaaattagcaaaatattaaattaacgtacaagttatggttccatacacttaagctatcggataaaatatttaaaaaatcttatttacagccaggcatggtggctcatgcctgtaatcccagcactttgggaggctgaggcaggtggatcatctgaggtcaaaagttcaagaccagcctggccaacatactgaaaccccatctatactaaaaatacaaaaattagccaggcatggtggcatgtgcctatagtcccagctacttgggaggctgaggcaggataattgcttgaacccgggaggcagaggttgcagtgagctgagatcgcaccagtgcactccagcctgggcaacagagcaagactctgtctcaaaaaaaaatcttatttacaatagcattaaaataaatttctgagaagaaatttaatcaaagaggtagaaaatctttacaatgaaagatatatcaatgagagaaattagaaaagacacaaataaatttaaaaatatttcatgtctatagattgaaagaataaatactgttaaagtgccatgttggccaggcacggtggctcacacctgtaatcccagcactttgggaggctgaggcaggcagatcatgaggtcaagagatggagaccatcctggccaacatggtgaaactctgtctctactaaaaatacaaaaattagctgggcctggtggtgagcacctgtagttccagctactcggagggactgaggcaggataatagcttgaacctggaagggagaggttgcagtgagccgagattgtgccactgcacttcagcctggagaaagagcgagactttgtctcaaaaaaaaaaaaaaaaagtgccatgttattcaaaatgatctatagattcaataaactccctatcaaaattccagtggcgttttacagtaatgaaaaatacaagtctaaaatttatatatgaaactacaataaactttgaatagtgaaagcaatcttgagaaaaaaaaaacaaagctgaacgacatcatactttataatttcaaactatatttgaagactatagtaatacaaacaggacggaatatgcagaaaaatgaacaaaaacctactactctcacacatttcagagatgatgcaaaaaaagaacttaacagagtttctcaaaattatgcagatatttgtgtgtcccccaaaacaatggaaaagcagtcagattgtgcagtctcttacatgccattaaggagactttggctctcactctaaactagaaggcagatcactgaagggaaagcagagtcctgagagaacttaaaagcgtaagacagaagactcccttatgtgagagcaaaatagaaaaactcggcagggtggcgtggctcatgcctgtaatcgcagcactttcagaggccaaggcgggcagatcacctgaggttaggagttcgagaccagcctggccaacacatagtgaaaccgtctctactaaaaaaatacaaaaattagctgggcgtggtggcacacacctgtagtcccagttacttgggaaggtgagacaggagaatcgcttgaacctggagatggaggttgcagtgagcccagactgttccactgcactccagcttgggtgacagagcgagactccatctctcaaaagaaaaagaaaagaaaagaaaaactctggctttccagaaactatttcctttggaatacagcttcccaaatcacattataagcactagctttttctttgacctttgaaccgctcatctatgttatctgttgtattcactttcactctcacctacctgggggttcggccaccatcctatgtctctttctagtccaaggctctttttcttgttccagacaggtgatcaggtctggcttagagacaacaatacctgttttattgaaagtaaataacataaatcttgcttatattgtctaatcaccaacatggcaatgtagtcagtaaagagggtgaaatagaatattcttgtaaatcaatcccaaaatactgatttataaaagaaatttctaaatatttagaaaatattttaaatttgttagttcttaatttcactgtccagtacaacaaatcaaaaactggtgttggcaattagattttaaagtgtgagcaataatattttatgccactaaacttctggaattaccactctaatctagagtgaagaatacagattagctcaggaatgcagaaagttcaggtcaagatgaaatatcttgaagaaattcttttctacagagatgaatccctaagatttttataaaaacagggatctgaaactcacttatgcaaagcataaattacctaaaaacattatacaaaaaagaaaaatgaaacctttagggtataataggaattgtatattgaagttatcctcacccaagaagaccaggtttctgtagttctctaacatcacattcctatataaattctgctgtatagtgtccaggcattgccactcctccagagagaattctatggccacatccctaaatttcaatggttcctgaaaaacacacacacacacacacacacacacacacacacacacacatacacatttagaaagtggccatggaaagaatttataatttgattcaaggtaaaataagaaagtgaagagaactggttctgacttacagaaatgactgaaattatccaataaaataatttttttttacacaggaacattctctaatttgttctccaaccatgagaaaagaaagcggcattagatctataacaccagacctaaataaatcgccagtcagaatggcgattatcaaaaattcaagaaacaatacatgctggtgaggctgaggagaaatatgaatgcttttacactgttggtgggaatgtaaattagttcaaccattgtggaagacagtgtggtgattcctcaaggatctaggaacagaaataccatttgacccagtgataccatttctgagtatatactcacaagaatataaataattctactataaagacacatatgtggctgggcgcagtggctcaacctgtaatcccagcactttgggaggctgaggcgggtggatcatgaggtcaggagatcgagaccatcctggctaacctggtgaaaccccgtctctactaaaaatacaaaaaattagccgggcatagtggtgggcacctgtagtcccaactactcgggaggctgaggcaggagaatggcgtgaacccaggaggcggagcttgcagtgagctgagatgatgccactgcactccagcctgggcgacagagcgacactctgtccccccccaaaaaaagacacatatgttattgaatcactatttacaatagcaaagatatggaaccaacctaaatacccatcaatgatagaatggataaagaaaatgtggtacatacacaaccatggaatactatgcagccataaaaaagaatgagatcatgtattttgcagggaccatggatgcagctgaaagctattatcctcagaaaactaacacaggaagagaaaaccaaacactgcatgttgtcactcattagtaagagttgaacaatgagcacacataaacacaaggagacaaaccatacacaccagggccagtcggggggtggagggacaaggagagaaagagcattaggataaatagctaatgcatgccaggtttaaaacctaggtgatgggttgataggtgcagcaaaccaccatgacacatgtacacatatgtcacaaacctacacgttctgcacttgtatcccgaaacttaaagtaaaatagaaaaaaaatatattataaaagactatacttagaaataaatgataataaaaattatacaaaaatttattttttttttgagttggagtctcgctctgtcacccaagctggagtgccatggcgtgatctcgggtcactgcaacctctgtctcgtgggttcacgcaattctccgacctcagcctccagagtagctgggattacagatgtccgccaccatgcctggctaatgtttgtatttttagtagagatgggctttcaccatgttggccaggctggtctctttgccaggctggtctcaaactcctcacctcgtgatccacttacctgagcctcccaaaatgctgggattacaggtgtgagccacctcacctggcttataaaagttatacaagctaaaagtgctgagatacaacaaaaagaaaaagaaaaaaaattatgttacagggcactgtgcctgggataacacattatgtaatttaatttttataacaccctgggagctggtactgtttaataattcccaggatttagatgaaaagcccggcatttttatttcttctgtttctctgtcattgattttttttaaaaagtatacacaataaaagctaaatatagacagagaggaatgcggaaagaatttaatgtattttagagaaatttatattgtgtctgtttacttgtttgtgacttgtagagcaactactagatctgtaagaatagaaaacaagttgctagatagaatgcaagcactagttttaataaaaaattataaccataaaatatatactttatttttttaatttatctgcttttgtgtttcaggaattgtaagcaccagccctagcagcagaattcaccagccaaaactccgatctccaaaaatcagttctatgaggcaagacttaagggtagggccagacctaaataaggcctccaaaaaggtgaacctgagcagaactggggcagggagtggactctatatagaattctgttctctatgccactggggtatttccagttctgtttttcctaaacttaccttaaaaaaaaaatccttaaatctcagagtttgtataattttaatctttcttagaccctgccctatcaattatatgacatatactaataagcaatttgaacacatttataaaggttttctagggtaattttattaaaagataaatatgtattaacaaggtaaaagaaatggaaatagaaataattcttctgtctataaatatcccttcaggtgatgacatcgcaagtcacaattatataaagtggcacaaatagagcccaaattttctgcacacatctatttattgtaccaattatatgatgcttaatttaaccatttatccagttgctagactaaaagctcctggattgtagggaccatgactgcttcatctatttttctaatggccatatgaaaagaaaacaatttagccgggcgtggtggcaaatgtctgtaattacacctactcgggaggctgtctcggcctcccaaagtgctggaattacacgcgcgagccaccgcgccaggccttttgactctcatacatttttaatgaaaggaaagagagactaggaacgccacggaccaaagctcttcccattcatgaacccggcacccgtcaggattcgcccctgacgaccctcccgtggtccctgcacaatctgggagagacccggcgctgcggatgcagagccacccagagagagctgcaggccaggacacagtcactgagcagggaggagaaaggacgcccggggggctggctgtcagcgcagccgccatcttatggtccaagtggactgaggccgcctgggcgaggagaactcagggcgcaaattgtggagctgactgcggcgaggtctgagtcccgccacagccccttcccctctctcgggatgtcggacccgacattctcaccatttctaggtttccgggggacctggcgtcttagctatggatcgccaatacctgcaggtcagagggccatagaggctgggcctctagaagaagaggacacagagcagtgaagacgagacccggagctcgggctgaagggagagacaaaggccccgccaatcccggaagccgccctgtctgctccagctgcatgcctgattggacagttcccagcccagcgtccctgactggataatgattaaaaccccacccctcaggtcctgagtgacagaagatgtgatcagatgctctgctgaatgaagactaacaacgtaagttgcagcgttttcagacagggctccctccctgagctaagccaggcccacccaacagggtatttgcctttaaccttctgtgtaaggtcacatgcatttcaaataatatactagatagctattcaaaaataaaaatatatataataacaattattttaatatttcatcttttatgaccgtcctggtttctggcagccatagtccctaccccgacagcccccagcccagatggcattcaaatcttcctggatgggcttgatgcccgtcactcacgcgctctttagcactgcgttgtgttggttactcaggcctgggagaggtggtggggattgtagatccagggtaggagccaccttacacccagagttcacctggccacatgccagcaaggaagcccatgaagcacagccctagacactgagcctcggcacctccagctgcactttctatttatatatcaggtttttttttttttttttttgagacggagtctcgctctgttgcccaggatggagtgcagtggcacaatctcagatcacaacaacctctgcctcctgggttcaagtgattctcttgcctcagcctcccgaggagctgggactacaggtgcgtgccaccatgcccggctaatttttgcatttttagtagagacggggtttcactatgttggccaggctggtcttgaactcctgacctcgtgattggcccgcctcagcctcccaaagtgctggggttacaggtgtgagccaccgcgcccggcctatatatcaggtttttaaaaccataaataaacagacacaaaagcagccactttgattgaggagaaagtgggagcctaaagcagctgaccctcaaacagctttgccaagcctcaggccaggccaggccatctcaacactccaaggctacatgatagttacagaggacgacagttcccataggtacttgtcaagcactgtgctagcttctcagtcacagagtctcagaatttctccttgccaataccctgtgaggggaggccctaactcactagagcacaggaggttcctaagctcttcccaggaaatggttaacaaagtgtggagctgggggaaaacccagtcagaacaaatgacttcccagggtctcccttgactccatccctatctccacatggggccaggaggtgaagcgagccccctaaccccctccattccactctctcctcaaagtggctgtttttgtgttttcttatttatgggatttcaaaagcctgatttttaattttgagtagtttcaggcttgtatgggtgtatttgtataggctttattagaaggaagagggcttaagacaataacatttttaaaatgtctcagtggggaatagacttccatgtcatgaacgatgatgttgacctccttctgctgtctttgtgcaaagtataaatagtgtgagaattggcatgtgctgggttgtggtttcagtgtgggagggcagttccttaagatggaaaccaaatctcaccgagctgtagcagccacactcaccttttatcacattccccaccatagtctttcacttttcttctgtgcttaaatttctttcaacatatatatatatatatatatatttttttttttttaagacagagtcttgctgtgttgcccaggctggagtgcaatggtgcagtctcggctcactgcaacctctgcctcccaggttcaagcaatcctcctgcctcagcctcctgaataattgggattacagatgcgtgccaccacactgggctaatttttgtatgtttagcagagttggggttttaccattttgggcaggctggtctcgaactcctgacctcaggtgatctgcccacctcggcctcccaaaatgcagggattacaggtgtaagctaccatgcctggcaaacatacatattattttgattatatatatagggtgtataaatatatgtgtgtatatatatatacacatatatatagggtatatatgtgtatatatatatatgtttgtgtgtgtgtatatatatatgtgtgtgtgtgtgtacacatagaggtctcactctgtcatccaggctgaagtgtagtggctgaatgatgggtcactgcagcctcaacctccagtgatccttctacctcagcctcttgagtaggtgagactataggcaggcaactccacacaaggccaattttctaaatttttgtagagactgagtctcactacattgcccagactggtcttgaacccctgggcttaagcaatcattccaccatggctttccaaagtgtttggattacaggtgttagccatcaaacccagccaacaatattttttaaagaactgttacaaccaaattatgagctatggttgtgccactgcattccagccagagcaccagagtgagaccttgtctccaaaaacaaaacaaaacagaaacacttatgaccaaattaaaattctaaggttgtgtcctctgtgtccccttcttgccctgtaaactatcactgttaaatataatgcgtattgagaaaactgttagatattattaagaaattcctatatatcttctaagtgagataaggtattctaatgtgacccaatatttcctcacccctacctccagggtctaaactagcaaatcaaatcaggacatccacaaaggacagttggccatgttcaattagaaaattaaatatccccgttagtgagagtaatccagtgattttaaaaaagagaagtcaaactgaaatgcagcgtagtcacggcacaattaccctggaatagccacttcacatggaatgactgaggagcctttctaagatgaacaaatttgggtaacgtaattctttctttctttctttctttttttttttttttgagatggagtcttgctctatcgcccaggctggagtgcagtggcataatttgggctcactgcaacctctgcctcccgggtgcaagcagttctcctgcctcagcctcctgagtagctgggattataggcgtgcgccaccacgcccggttaatttttgtatttttagtagagacggggtttcaccatgttggtcaggctggtctcgaactcctgacctcgtgatcagcccacctcagcctcccaaagtgccgggattacaggcgtgagccaccgtgcccggcccggtaacataattctttctaaaccattctcagcctgggctgcctcccacccccgccttatttctaatggccatcccacgatgtggtcagcagtgtggtacggcatggtgagagaggcgctcagggatgggatgaaggtctttcccgcattatgaaaatgattaaaaaatgtccaaatgggcagggcgcggtggctcatgcccgtaatcccagcactttgggaggctgaggcgggcggaacacctgggatctggagttcgagagcagcctggccaacatggtgaaacctcatctctactaaaaatacaaaaagtaccagggcgtggtggcatgcgcctgtaatcccagctactcgggaggctgaggcaagaaaatcatttgaacctgggaggaggaggttgcagtgagccaagatcgcaccactgcacttgagccagggcaatgaggcggaaactcggtctcaaaaaaaaaaaaaaaagtccaaatgttctttcttacccttaagtagcaaataagatgcattatacaagacccaggtaaggaaaagagcaagtgcatttcatgtctcagcttacttcttaattagctgtaattccctgtgcatgttaccttacctttactgtccgtaaaatgccctactgccgagcggggcgggtggtggtatggagagaatgctgttgctttatccaatcagtggcgctggcgcgggaaccgcccaatcaggggcgcagccggagaggagggcgtggcttccgacattccgcggggtctttacctcttgctcccgccagagtttgggatcggtctcttctgttccgcgtcctccacctcggtagcccctggtgactctgttacagcctctgttgacctatgatctgcagggagacgcacagccaggacatcctggaacctgggaaagggtgagtgtgcggggttgggcaacccgagaagggagaccaggctgtgaaaccagcagaaccggcctctccacagtccgctcccaggtcgccgacctgagtccccgctggcgcagctccgtcccaggcccctctggccgcaagatggcggctgggcccacagccgggaccccagcgtccagccccgtccgtgcggggccatgtctggagccccctgagcaagctcttcacgcagcctcgagtatttcccaggttgttcagggatgccaggcgggtcataagagcagaatcccgacccggtgtttgcgtgggaagaactgcagcctatggggctcccagtgtcttttgttaaacattttgtttgagacggagtcttgctctgtcgcccaggctgaagtgcagtgcgtgttcacggcaacctccgcctctcaggctctggtgattctcgtgcctccgcctcccgagaagctgggattacagacctgcgccaccccgcctggctaatttttgtatttctagtagagaagtggtttcgccatggcggaaggtggtctggaactcctggcctcaagtgatccgccagccttggccccccaaagtgctaagattaggaggagcatgaggcactgcgccaagcctcttctcttaaaaattaaagggagtcagggttaaaaccttaaagaggttatttgagccgtgattggtgaaatggaaagcaccccagccatagtatgtggcccacctgagagacataaagcaaagggttttataaagggcgtgtgagaaggcaaaccaaatgcaagaattggttagttatgtagtcaccttatttgtatgatacaggtggaaatttcctggttatgtaatcagaggttaattgcaggtttatgattggttaataaaattcaattatgattgaattttgtttccgcctaaaatagtaatctataagatataaactcgagttaggttttacattttttacttatgaacacagggcactagggccacttcagtctaatttcctgctttttaattactttaacactccacaggaggaggactggttttcctctgtgacttcctaatgtatggcaagcaggacttcttctaatccactaccctcttcccctagcttaactaaggcttgcagtaaaattataaatttccactttctttcctacattctcaaatgtaggaaatgaggacaaacaacttcctctctccaatttacaacactatcaactatttgtcctttattgtgcatttcagacacagtgttttaattgttaatcatgtttttacactgcagtggatggcaggtttttaaagatttgttttctgtttgtaaacacttttttattggagacagagtttcattcttgttgcccatgctggagtgcaatggcatgatctcagctcactgaagcctctgcctcccaggttcaagtgattctcctgcctcagcctcccaagtagctgggattataggctgccaccactgtgccctgctaatttttatattttgagtagagagtgggttttgtcttgttggccaggctggtcttgaactcctgacctcagatgatttatctgcctcagcctcccaagtctgtaaacattttatgtgagaaaaaaagtagaaaataatcctctggaactccactttaaaaaaaaaaaaaagtctgcgcctctccttcttttatcttccctaggcacacacaccctactagtacgtctttgggttgaagttttgctttggagaaattacagggcctttacagcagccctttagtctattcttggtaatgagtttcagaactgtctggggtaactcaacatacccacagtggccatatatcttggagtgtctaatgagtatcatcccctgagtcgtctcttagaggacagtctgaggagtaagagtgtagcctctcagaagagcaactggatggcctaggcctgtggaaaatttccttgtatactatttgtctaaaaagctaacctcttagaaaattaaaattattttttcacaaaggaatgcttctacactgttggtgggagtgtaaattagttcaaccattatggaagacatggtgggaactccctgaagacctcaagacaggaataccatttgacccagcaatccattattgggtatttacccaaagcaatatgaattattctattataaaggcacatgcatgcgtatgtgcaccgcagcacacttcacgatagcaaagacatggaatcaacctaaatgcctatcagtgatagactggataaagaaaatgtacatataaaacatggagtactgtgcatctataaaaaaaaaatgagattatgtccattgcaggaatgtggatggaactgtaagccattattcttagcaaactaacacaggaatagaaaactaaataccacatgttctcattataagtgggagttaaataatgggaacacatagacccgtagaggggaacaacacatactagagcctattggaggagggagaggatcaggaaaaataacttatgggtagtaggcttaatacctgggcgatgaagtaatctgcacaacaaacccccatgacacaaatttacctatgtaaaaaatttgcaatgtacccttgaacttaaaagttaaaaaaataatttgttagcttttccaataattccctgatagcgttttgattttatgtgtgtatgacacctattatgtatcagaaatttggattacacagatgaacagggttcaacatacctgccgtgtaggagtttatagttcattagcatggataggtgtgtaaaaaattaatttattctggagaataatacttgtacataaaaagacataaggtattgagctgtaaggtaatagtgatcaattctgccactaacatagcagtgggaatatcaaggagggctttatagaagaggtgacatttgagtgggtgtcattgtttaatagaactttttgtattaatgttgctggtgcggatatttcatttcctttttttttttttttttttttttttttgagatggagtctcactctctttcccaggctagagtgcagtggtgcagtctcggctcactacaacctccacttcccaggttcgagtgattctcccaccgcagcctcccgagtagctgggattataggcatgagccactgtgcccagcctcagagtgtaccctttaaaaaattattttaaaaaaattttacctcttgactctgaaatatattgagaggtcttcccccaatgagataaaaatgaacaagtgtgtaaacagttaagaagttttttctcaagctaattttttttttttttttttgagacagagtcttgctctgtcacccaggctggagggcagtggcgcgatctccccggctcactgcaagctccgcctcccgggttcacgccattctcctgcctcagccttccgagtagctgggactacaggcgcccaccaccttgcccggctaattttttgtatatttagtagagacagggtttcaccgtgttagccaggatggtcttgatctcctgacctcgtgatccgcccgcctcggcctcccaaagtgctgggattacaggcctgagccaccgtgccgggccaaatgtttttttttttttttttgagacggagtttcgctcttgttacccaggctggagtgcagtgtcgttatcttggctcactacaatcttcacctcctgggttcaaccaattctcctacctcagcgtcctgagtagctgggattacaagcgcctgctatcaaggccggctaattttttgaatttttgtttgtttgcttgtttgttttgtgtttttgggagacagagtcttgctctgtcatccaggctggagtgcggtggcatgatctcggctcactgaaacctctgcctcccggtttcaaaccattctcctgcctcagcctcctgagtagacaggtgcgtgccaccacgcccagctaattgtatttttagtagagacggggtttcgccatgttgcccaggctgttctcgaactcctgacctcagattatccacctgcctcgccctcccaaagatttggggttacaggcgtgaaccacggtgcccggcctaattttttgtatttttagtacatacggggtttcattatgtttgccaggctggtctctaactcatgacctcaggtggtccatctgcctggggctctcaaagtgcagggattacaggtgtgagccaccacgcctggcctctcaacctgatttttatttttagtagacacattggtgatgagacaatcaaatgttcgcattgatgagaaaaggcagaaatgatttttgttctctggattcttgaaataaaattttttccaaaggacaagaagatcccatcccagtaaggcaatgcaagaacctgcaagcaaaatgtacctgagactcacagtggggtacaaagtgtctcctgggaaggtggtcactgagtaatttaataggcaggatggggatgacagaatattttgagtgatattatggtctgacttgacagtggagtcagacatgtttgtgtcccaatcagcactgccacttcctgagtttgtcaccttggaaagattttttcacttatttcaatttcagtttttttttttttttttttttttgagacagagtctagctctgtcgcccaggctggagtgcagtggtacaatcttggctcaccacaacctccgcctcccgggttcaagctgttctcctgcctcagcctcctgagtagctgggattacaggcgcccaccagcatgcccagctaatttttctatttttagtagagacggggtttcactgtgttggccaggctggtctggaactcctgaccttatgatctgcccacctcagcttcccaaagtgctgggattacaagcgtgagccaccacgcccggcccaatttcagttttttaataactgtaaattacatttcatcagaagagcttaaaagatgtttaaaaagtcaacgactatgaaaggtatatttcagaaaaatctagtgatatgttttatttgttaaatttatgtttttttctggttgtgtaattttaaatagaaccccaggggtttgctttgagaatgctaccagagaagagaaataggaaaaatcttttttccattatggctatacaaagtgaatacatttccacaagcaaatatgatagattaattggtgcattgtatatatttctcaaaccatcagctcctctttttttcaaagtctagaatttgtaatggtggatatctctgttctgtattctgttgtctagatatccaagtttaatgcaaaattttatgacatggaacttgacactttctagaaatgttcacatatggttgtttattaaattatctctcatggaaatatttaaatgacatgtttattgtctgaaaaggacagatatttaagctttttttttttttttttctttttttttgagaaagagtctcgttcttttgcccaggctggagtgcagtggtacaatcttggctcactacaaccttcacctcgcaggttcaagcgattctcctgcctcagcctccctagtagctgggattacaggtacacaccaccaggcccatctaatttttctatatttagtagagacagggtttcaccatgttggccaggctgttctcaaactcctgacctcagccaatccgcccgcctcaacctcttaaagtgatgggattacaggtgtgagccattgtgcttggccccctttaactattttatgtgactcttctctcttacctgaacgttgcccaaaaagagattgtgacatatatttgggcccagcaccaaggtgatgtaactctcctcttcagccgggccttgcccacagaagagagaatgacttattcctgagtttagcatacaggtgatttgattcttctgctgactcccagaagtcactgtaacatatatctgggtccatcgctgagactgtgtgactctcttctccctgggacctgtccacagtggggattgtgacgtattgcttggccaagcacctacgtgatatgactcttttcttaggcctgggccctacccactggagtgattttgacacattgctgggcctagctcaaaggttatatgtgacttcacacttcttcctgggccctacccatgaggggcactgtgtcttaactctgagacacttaattaggtgatgtgactctcttttttcgagatggagtctggctctgtcacccaggctggagtgcagtggcaaaatcttggctcactgcaacctccacctcctgggttcaagtgattcaactgcctcagcctcatgagtagctgggattataggcatgcaccgccacagtcagctactttttgtatttttagtagagatgaggtttcaccatgttggccaggctggtctcaaattcctgacctcaagtgatccacctgccttgacctcccaaagtgctgggattacaggcgtgagccacgatgcccggccgatgtgtctcttttgtttggaccctcttcttgggatattgtgacatattgctgggcccaaaatctaggtgatgtgactctactctttggtctctgcccaaaaagggattgtggcatatcactgggtcaagaacctagatgaggtgactctcctctccagtctgggacctgcacacattgtgtgttgagacatatcactgggtctaacacctaggtaatgcaactctcctgcaagggccccgcccacagaagtattatgaaatatctttatattaatcacctaggtgatgtgacactcctcttctgcctgggaactgcaaaaaaagtattattacatatcactgggcccagcacctaggtgatgtgactctttgctcatgcatgtgctctgcgaactggggtgtttgttacatatagttgggcctaaaccctaggtcatgtgattctttcattttcctgagccatactcatagcattttgacatatttttgggcccataatttagatgatgtgactctcttgcatgggccctccccataaaggtagtgtgacatattgttgagcccagtacataggtgatgtgactcatagttctctatggattgggctttgcccaagcagggattgtgatgtgttgctggactcaccacctacgtgttatgactctcctcttctgcctaagccctgcatgcattgtgtgttgtgacatatgcctggattcagcacttaggtgatataactttatgacatgggaactgcccatggaagtattatgacatgtctcctttccatcacctaggtgatgtgacccttttatttttcttgtttctggcatattttgggtatagtgacgtatcattgagttcaacacccatgaaatggaggcttctgcctgagcccagcacataagtggccttgtgaaatatctttgcattcattatctaggagatttaaccccccttttctgcctgcaccctgaccactgggaagattgtgacgaatcaccggtctcagcaatcaggtgatctgtttttcctgcctggtccttgcccacagatcattgtaacatatcactgggcctagcatctaggtgatgtgactctgctgactgtattctgctttcagggggagattttaacataaccctaatcaagcacccatgtgtgggtgtggcacttctgccttatccctgccctcagagaagattgtgacatatcactgccccaaaatgcggtgatgtgagtctactggtcaatacctattcactggtgggattgtgatgcatatcttatccaaacttacaggtgcaataatgactctcatacctctaaacaaccagtagcagatgtagtttctctcatagccagggtcaggaaaatgagtaatatcctgggcctcctctttgtatgaaggtcataaagaattaacactctctcacatactgtgtaaagttgtcaagaggtacagagaatgtcctaacagaactcagcacacaggggaggttgtgacactcatatgcatagcctgccaacagtaaagactgtcatccttccacataaacacagctcaatgttgaggttctgaatctcatacccagctgcagtcaaaagttggaaaattgaatgtcatgttaattcagtccatagagaggtcagtgtctctgagaccaagattcagcacatgtgtgagttgttgacttcaataaatgacacaatttgcaggagggattgaggttttcatacacaaatccagaccgtcattgagactcattcatgtacttatacccaacatacagagggtattatgtctcatacctagaactaaaaaaatgtgtgaaattgttaatctcatacctccaccttcatccagatgtgattgtgacatacaattctgcccagcaactgagtgatttgactctcctgcctgggcccagtgtacagacggggttgtgccatattgctcaacccagcatttaggtgatgtgaatctattcttttgtcctagtgcttttcacagagggcattggacatatcactgtgagtaatgtccaggtgatgtgacttttctctacttcctgggcttttcccaagaagggactgtaatatatttctgggtccagaacctaggtgatgtgactctcctctcctgcctggtttctgttgtacattgtgttattgacatgtggctggttctaataccttggtgatgtaaatctcctgtatgggccctgcccacagaggtgttatatcttttcattcatcacctaggtgatgtaattctgtttttctgcctgggccctgccggaagggaggattgtggcatatcactaggcccagcacctaggtgatatgattcacctgtttttcctgtgcctcacatattttgagtactgtaaaatattactagacctaccacctatgggattgcgtgctcctgcctgggctctgcccacagggacattgtgacatatatctgcatccatgaagtaaaagatgtgacatttcttgcctgcaccctgccctgcacaggaaagattgtgacatatccctggaaccagacacaaggtgatttggctcttctgcctctgtcttgcccccagggagcattgtgacagtgctgtgactctgttgcctgtgctgtgctttcaggagagaattgtaacatatccctggctgagcacctaggtgatgtgacactgctgcttggttccttccctcagggaagatatccttggctgaaatcccaggtgatgtgactctcctcctaactccctacctacaggttaaatggtgacatatactatagtcagcttataagtgcgatgattactctcataactcaagtcagctattagaagaaatagtgtctctcatagcttgccttagatgagtcacatccttggtctctctttttatgaaggtcataaagaattgccaccctcccacatatcatataatgcccttgagtgttacaaagagtgttatcccagggcacagcacaaaagtgagcttgtttctaatatgcacacctcgccaaccattaggattatcaccttcacacatggaaagagcccattgctgaggtcttgaatctcaaatgcaaacactgtccacagttggaattgtgactgtcatatatgagcctccagccacagttgagatggtgacacatttctaaactcagaacatagcagatgaggactactatccaaacccaaccaactggagagatgtttaccccaatacctgggcttagggccagaagtatggtcatgggtgcttacaaacatgattttagagtaaattgtgactctcatttatactggataaagccattgagtagtacagagagtgtactagccgggttgcattgagttgagatcgtgccactgcaccccagcccaggtggcagtctgagactccgtctcctcctgtgtgtatgtgtgtgtatatatatatatatatttttattttggatggagtatctctctgttgcccaggctggagtgcagtggcacgatctcagctcactgcaagctccacctcccaggtgcacgccattgttctgcctcagccactccagtagctggtactacaggtgcctgccaccacgcctggctaatttgatatatatatatatatatatcaaattttttttttttaagacagagtctcactgtcacccaggctggagtgcagtggcgtgatctcagctcactgcaacctccacctcctgggttcaagtgattctcctgcctcagcgtcctgagtagctgggattacaggcacgcaccaccatgcccagataacttttgtatttttagtagagatggagtttcaccatgttcaccaggatggtctcgatctcctgacctcatgatctgcccgcctcagtctcccaaagtgctgagattacaggcgtgagccaccacagccggcctggagatttttactgttgtatgaacacacatcaaatagcatacatcatcattttctcacataaacatagcctactcttgaagttctgactctcacacatagaggtagtcagaggtggaaaaattgactctcatatgtggattcagtttgcaggtgagttgatgacacttagagcaagattcagcacacctgtgagtctgtgacttcactaattagacaaagtccacaggaggagtataggctgtcaggtacaaatttagttcatcgttgaaattgtaactcctgttcttagacacaatatataggaagggttaacttcctattcctaaaaccagaacatgtgtgggattgttaatttcatccctgcaccttcctgcaggtttaattgtaacattttcagcacctgagtgatctgactcttgcctaagaccagcccacagatggaatagtgacatattgctgaaccctgaactgaaaggatgtgactctatttttctgtgttggtgctgctcacaggggacattgtgacatatcgctgggccttgcacttaggtgatgtgagtctcctcctttgccttggcactgcccacagaatgcattgtcacgtatctctgggccccacacccaggttatgtgactctcctgactgtcccctgaccacataagcaattatgacatattgctgggtccgactctctggtataactctactgccaacaaggagcattgtgacatatatttccactcatcatcaaagtgatgtgactctcttctcctgcctgttccctgctcacagtgggagttgtgacatatcacttggctccgtaccaaacaaatgtgattcttcttccatcatgagttctgctggcaagggagattgagacatattatggagctctacaccaatgtgacattactgttttgcctgggcctggacctcagaagccattgtgacatattactgggctcaacaaggtaacatgagtctcctgtatggaccctgacaacagagcattgtgacatctttaagagcatcaactatttgatgtgactctccttttacacaaggcttccctcatatgagagattgtgacataccttctggcccagaaatcagatgacatgtttcttctgcctgagctttgcttacagggagcattgtgacatatcactggtctcagcacccatgtgatatgactctactgtctgtgccctgatttcaggaggaaattgaacttatccctgactgagcacccaggttttaactcttctgcctggtgtctgctctcagagaagattgtgacatatccctggcctgttacccagatgatgtaactctcctgctcactccctatccacaggggagattgtgacatatacctttgttcagatcataggtgtgatgtttactctcatatcaaaaatcagccaataagagacaaactatctttcatatgtgggcttgggaaaatgagtaagattctggctctcccctttgtaggaaggtcagagagaattacactctcacatattgtatgaagccccgggtggtacagagagtgtcctaacaggttgcagaaaacatgagattgtttttgtgtatgcacactttgccagttgttaagattatcaccttcatccatggacagagcctactggtgtggtcttaaatcttacaggtggatgcagtgcagagttgaaattgtgactgttgtaagtgaacatcaggcaacagctgaggtggtgacttattaataagcctagcttataggtagatggcaactctcatatctggacccagccattacagaggtgttaactctcatatctgggcatagagccacaggtacgatcacgggtccatagcagcagaaaagtctcccagccacaaaagattgcgactctcacgtgtaccttataaattcctcaggtggtacagagagtgttctaactaggctcagtgtagagtttaggttttcacactcatgcacacccagccaacagtaaagattttcatcttttcacatgaacacagtccactggaggttctgaatctcatatgcagagacagtcacaagttggaaaatttactctcataagtgaattcagtccaaaggtaagttggtgactttcagaccaagattgaacacacctattagtctgtgattccactaaggtgacacagccagtaagagggattgagtctgtcattcagtgattcaattcattctaaaaattgtgacttgtgtgcttagatccaacatacaggaggtgttgactttcataccaagaactggggtatatacaggattgttaatgtcatccctggtctttcctgcaggtgtgattttggcacacacttctgcccagcaccttagtaatgtaattcttcagaattggcccagcctacaaataggattgtgccacactgctggacccagcgcctaagtgatgtaactctgttctgccttggtgctacttgaaaaagacattgtagtatatctcagagccttacacccaggtaatgtgagtctcctctcatgccttgctgctgcacacagaagcaggatatgcacaggattgttaatctcatcttggaccttcctgcacgtgtgactgtgacagatgcttctgtgtagaacctgagtgattttactctcctgtctggatttaacccacagatgaatcgtgacatatcgctggaccagaaactaggtgatgtgaccccattgtcttgcctctgtgctttccacatggggcatttggacatatcactgtgccttgcacccaggggatgggagttttctctcctgctttggtgccatccacagtgaacattgtgaaatattgctgccctcccccctagtttatgttactctcctgcctctgctttgctcacatgggtcattgtgacagtgtgacatactgctgggtctaaaactcaggtagtgtaactctcttgtttgggttctgcctgcaggagccattgtgacatatctctgtgctcatcacccaggtgatgtgactcccttttactgcctggtttcttctcacaaaacatcttgtgacatattgctaggccccatacctagctggtatgactcttttaggctccacctgctgcagagattgtaacaaactgctgggcccagcagcataatgatattactcttttgccttgggcctgccctcagaaagcactgtaacattcatgggcccaatgccgaggtgatgtgtgtcttcagcctggaccctgcccacagggggcattgtaacatatcacttggctcatcagatgtttgatgttatcccctcccctctcctaccctgtgtttgcctataagagacattgtcacaagtttctgggcccagcacctaggtgatatcttcctgggacctgccatatggggattgtgatatatcgcatggcccagtacttacttgatgtgactctcctctcatgcctgggccctgcttacaggtgtgattgtgacacatagcttggcctagcccctaggttatgttactctcctcttatccttcagttattttcacaaggggcattgtgacatattgctggactgggaacccaggtgatgtgactctcctctactgcctgaaatacaaccaaaaagaaagtttgatatattgcttggccaggatcctaggtgacgttattcttttctcctgcctaaaccctgcatacattatgtattttgacacatcgttgaggccaacacctaggtgatgtaactctcctgcatgggctttgcctacaggggtatgatgatgtatcttttcattcatcacccaggtggtatgactctccacttatgcctgggccttgatgaaacagaaattgcgacatatccctggacttggcacttaggtgatgtaactcacctttattgccagggcatggaatattatgagtattgtgacaaatctcttggcctgacacctaggggatgagagactcctgcctgggccctgcccacaggatgctttgtggcctgtcttctggttttattacctagaaagatgtagatgtgactttcctcttctgcctgcattcttcccacagagaagattgtgacatcactggacccagcaattagaaaatgtttctctcctgcctgagccttgcccacaagaacattgtgacatatccttgggctcagcacccaggtgatggaactctaccacctgtgccctgtctacttaggctattgtgaagtatagctggtttcaatacccaggtgatgtaactctcctgccaggccactgccttccagtgatattgtgacatgtctttgtgccaatcacccaggtgatgtgaatcttttcacctgcctggtccttgttcactaggggataataatacatattgctggtttcagcaccaagctgatgtgacttgtctcttcttcgtagattctatcccccaaaaaactgacatatcactaggcccatcagcaaagttattttgcctggtcctgcccttaaaagacattgtgacatattgcagtgaccagaaccaatgtaatttgtctcttgcctaaaccctgcctactgggggaattgtgatagatctcttggccaatcaactgtttgatgtgactttcctttgtgggttttttgttttgtttttgatggagtttcactcttgtttcccaggctggaatgcaatggcgcaatctcggctaaccgcaacctctgcctcccaggttcaagcgattctactgcctcagcctcccaagtagctgggattacaggcctgcaccaccacgcccagctaattttttgtatttttagtagagacagggtttcttcatgttggtcagactggtctcgaattcctgacctcaggttatctgcccacttcggccccccagagtactgggattacaggtgtgagccactgtgcctggtgactctgttttttaaccagggctttgccaatagtagagatcgtgacctatctctgggcctaacacctagatgttatgactttcctctcctgcctggtccatgcccacagaaaagagagtgacttaccgctaggctcaacacacaagtgatgcgattcttctgcatgatcccagcccacaccgcttactgtgacatctctagacccatcacctggatgatgtgactcttcttcttgggaactgtccataatgaggattgtgacacatcacttggcctagcacttatgtgataagactcttcatttgcctgggccgatcaatttgggcgactgtgtcatatagctttactcagcccctaggttactctcctgtttttcctgagtcctacccacagaggtcattgcaacatatttctgagcccctcatttaggtaatttgactgactctcctgcctgggccttctgctcagtgatttttgtgacactttttttttttttttttttttttgagacggagtctcgctctgtcgcccaggctggagtgcagtggcgcaatctctgctcactgcaagctccgcctcctgggctcatgccattctcctgcctcagcctcccaagtagctgggactacaggcgcccgccaccacacccggctaattttttgtatttttagtagaggcggggtttcactgtgttagccaggatggtctcgatctcctgacctcatgatccacccgcctcagcctcccaaagtgctgggattacaggcgtgagccactgcgcccggccatgacacattttttgactgagctcctaggtaataagactcttctccattgcttggactctgtcagagaaggtattgtgatgtatcactgggcctaacacctaggtgaagatactgtcttctcctgcctggacactccataaattgtatattttgatatgttgctggggttaacacatgggtgattcagctctctcacatggatcataagcatggggttattaggacatttatttttgctaatcacctaagtgatatgactcctccctgaaccctgtcagaaggaaagattgtgacttattactgaaaccagaacttaggtgatgcgactcttctgtctagcaaccacgtattttgggtattgggacatttcacatgtccaaacacctagaagaatgggagactttggcctcgtcctgtccacagggtttcttgtgacacatatctgtatccattacataaaagatgtgatgccttttctatctgcaccctgcccacaggaaagattgtgacatacttcaggccccagccaccaagtgatgtgtctcttctgaatgtgcataactttcaggagaaaattgtaacacgtcactggttgagaacccagatgatgtgactctcctgccttgtcacagtcctcagggaaaagaaattacatatcagtggcccagcatccaggtgacgtcgctctcctgcgtgatttctgccaagaagttcgttggtaacctacatctcagcccagctcacaggtctgatgataactaatacctcttaccggtcaatagaagagatactgtctctcacagctaggcttacaaaaaggagtaaaatcccaggtctcctctctgtatgaaggttatagagaattaccactctctcgtatattgtataaagcactcggatggtacagagcatgtcatcataggacccagcagacagatcatgtttcatgtaaacacaccctgccaatttttagaattgtcatcctcacacatggaaaagcccaccgatgaggccataattctcatgcacagatgcaggccacagttaaaactgtgactatcggccgggcgcggtggctcacacctgtaatcccagcactttgggaggctgaggtgggcggatcacaaggtcaggagatcgagaccatcctggctaacgtggtgaaaccccatctgtactaaaaatacaaaaaattagccaggcgaggtggtgggcgcctgtagtcccagccacttgggaggctgaggcaggagaatggcatgaacctgggggatggagtctgcagtgagctgagatcgtgccactgcactccagcctgggcaacagtgagactccgtctcaaacaaaacaaaacaaaacaaaaaacaaaactgactatcatttgtgaacatgtggccacatttgagatggtaactctataagatcatgggtccagagcagcacaacgttctcagagcaggttgcaactctcatgcacaccatatacagtcctcaagagagtgcccttacagggccaagcacacaggtgagattgtgaaacttatattcacacccagtcaatagcaaagattgtcatccacttaaatacagcctacttttgaggttctgaacctcacttttggagatagttgaattggaaaattgactctcatttgtggattttgtccacagttgggttagtgacttttttctttgagacagtctcgctctgtcacccaggctggagtgcagtggcatgatctcggctcactgcaacctccacctaccaggttcaagcgattctttcacctcagccttcagagtagctgggactaccggtgcatgccacaatgcctggctaatttttgcatttttactagagacagggtttcaccatgttggccagactggtctcgaactcctgacctcatgatctgcccacctcggcctcccaaagtgttgggattacaggtgtgaccgccatgcgtggcctcgggttagtgactctgtaaccaaaattcaacacacctttgtgactgtaacctcactaaggagaataatttatttatttattttgagatggagtttcgctcttcttacccagactagagtgcagtggtgtgatcttggctcactgcaacttctgcctcctgggttcaagtgattctcctgcctcagccttccgagtagctgggattacagatgcccaccaccacacaggctaattttttgtatttttagtagagatggggtttcaccatgttggtcaggctggtctcgaactcctgacctcaagtgatctgcccacctcggcctcccaaggtggtgggattacaggtgtaagccaccatgcccagcctaaggcacataatttgcaaaggaaattgaggctctcatgcacaaatccagtccaccattgagactgtaacccctgtacttagacccaacatacaggaggtgttgattctcatcccttgactcaggacatgtgtgtaattgttaatgtcatcacaagacctttctacaaatgtcttgtgacatacaccttggcccagcatctgagttatttgtctctttttcctgggcccagttcacagtgctgtatcactggacccagacccttggtaatgtgattctattctgccttgatacagcccacaagggtcattgtgacatatcacagggtgttgcacccaggtggtttgagtctcctcttctgccttggtgctacccacaggtgtattgtgacatattgctgggtctgtgttatgagaatcttttgcttttgccctaaacatataggccattgtaacattgctgagtccaacacccaggtgatgtaacgcttcatcctggacctgtctacagaggggattgtactgtatgtcttcaccaatcaccctggaaatgtgatttacttttcctgcctgttccctaatcacagggggtattgggacatactattgggtccagcacctagctgatgtgacatttttgtttttttaaggttctgcttagaaaagagattatgacatatgactgtccctaacactaaggtgatgtaacttcttttgttttggctctgcccttagaaggcattgagacatactgctgggcctagcactaagatgatgtgagtcctctgcctgaatcctgactacagggagcattgtgacatatttcttcacccattacaatctctcctatagaccaagctcaggtaaatgccctttatacctacgtgatgtgacattcctcttctgccggggccatgcccacagaatagagagtgacttattgctggggcaagcaaaacagtgatgtaattattttgcctggtccctgcacacaggagtcactgtgatatatgtttgggcctcccacctagataatgtgactcttttcttctggggtttgtccacagtgggaattgtgatatgccacgtgacatagctcctgtgtgatgtgactcctcttcattcttgacttcttccaactgggttgattggaatataaagctgagcccagcacctaggctatgtctctcctcttgtctatgagccctacccacaagagacattgtgacatgtctctaggcttctcacctaggtaatgtgacttgtttgcctaggccatcccctcaggggtattgtgaaatactgctggaccaagaacctaggtgatgtgactctctgctactgcttggggtgtgcttaaggggaaattgtgatgtgcatttaggtgcgtccatcacctacatggtgttactctcctctcctgcctgagatctgcatgcatcatgtatttcttttaattaattaattaattgttttgagatggagttttgctcttgttgcctaggttggagtgcaatggcaccatgtcagctcaccacaacctccacctctcaggttcaagcaattctcttggctcagccttctgagtagctggaattacaggcatgcaccaccactcccacctaattttgtatttttgatagagacggggcttctccatgttggtcaggctgttctcaaactcctgacctcaggtgatttgactgtcttagcctcccacagtgctgagcttataggcaggtgccaccacacctggctggaatcatttatttcaacatatctctgggtccaacaacatggtgatgcaactttcctgcatgggccctcccacagaaatactctaatacatcttttcattcattatcttggtgatgtgacttttctattctgcttgagcactgccaaaaaaaaaaaaaaaaagattgtgacagatttctggaccaagcacctaggtgatatgactttactcacttgcctgaaacctgcatattttggttattgtgacatatcactgaagcaaacacctaggggttggaaagtttctgcctgagcccttcccacagagagccttgggatgtatttttttaatccatcacctgggagatgaaaccctatacttctgcctgcattctgcccatagagaagattgtgacatattgctgggtcaagcaaccagctgttctgtctgtccttctggactttgcccacagtgagtcttgtgacatatatctgagcccagcatgcaggtgatcttactctttttcctgtgtcctgctttcaggagaggattgtaacatctctggttgagaaccctgtgatgtgactcttctgcctggtgcatgctctcggggaagattgtgacataaccctggcccagcacacagttgatgtgactcttgtgtttgttctctacccacaggtggaattgtgacatataacttgacaaagcacacagatgtaatgatgactctcatacctcaaagaagccagtaggagagataatgttgctcacagctacgcttaggaaaacaaagaatatcctggctcttctttctgtacaaatgtcatagagaattaccactctctcacatctgtaaagccctagtgtgttatagagaatgtcataacagggtccaccatgcagatgagattgcatttgtcctatgcacagcccaccaacctttagaattgtcaccctcacacatgggcagagcccactgggtgaggtcctgaatctcacatgaatgcactccacagttggaactttgactgtcatatgtgaacatctggccgcagttgagatggtgactcatttctaaacctagctcataggaaggtgaggactctattatctggactcagccaattagagagatgttgactctgggcttagaaccacagaaaaggttctggatttccttcttgtatgaaggtcacagaggatcaccactgttgcctattgtatgaagccctcaggtgacacagataatgtcgtaggagtacacagcacacaggtggatactgtctcttgcatgcacactcagacaacagtaaagactgtcattctcccacacaaacatatcccactgttgaggttctgaatctcaaatatggagtctgttgatagttgcagaattgagtctcatatatgggcctggtcaacaggtggactggtgactctgagaccaaatttcagcacacatatgaggctgtgactgcactgacggtctgcagaagaaattttggctctcttgcaaaaattctgtcagctattgagattgttactcatgtacttagacccaatatacaggaggtattgactcccatatctagaacgtggacacgtatggaatttctaatctcattcctggactttctttcagatgtgattgaatgtgtctgctaagcgttttagtgatttgacttttctgccttagcccagcccacagatgagattgtgacatatctcttgactctgcacctcaaaagaagtgactctttttccagccttggtgttgccctcaggtggcattgtgacatatggctgggctttccacttaggtgatgggaatctttttttcttgccttggtgctgtgcacaagttgcattgtgacatattgctaagatctgcactcaggttatgtgaatttgctttttttccctaagccctgaatattttgcaagttaggacatattactagccccaacacctataaaaagggaggcttctgcttgggccctttctacagggccttgtgacatatctctgcatcagtcacctaggagatgtgactctccatttttgcctacactctgcccacagaaaaattatcactaggcccaggtaccagacaatgtgtctttcttgcatggccttttaccatagaaagcattgttacctattgctgggctcagcacctaggtgatgtcattgctgcctgtcttgctttcaggagaaggttgtaacatattcctggctgagtattaaagtgatgtgacactcctgtctggtccctgccctcaggaaagattgtgatgtattcttggccaaaaacccaggtgatgttactctcctcctttctgcctgttcacaggtaggattgtaaaatatattttggtctagctcacaggtgcaatggtgactctcatacctcaaaccatctaataggagaggtgctgtcttttatagctaggcctagggtaatgattaagatcctcggtctccttttttgtacaaagtcataggaaattaccactttcttgtatactatacacatctcttgtggtacagtgagtgtcattccagggttcagcacacaggtgagattgtggttctcatgtgcacaccccaccaattgttagaattgtcaccataatacaatccacagttaaaattgtgactgtcatatgtgaacatccagccagagttggaatgatgatttatttctaaatccagtactttagcgggtgaaaattctatctggacccatgaaaaatttacctgggcttagggccagagtaaacacagtttacaggaggaatgaaggctctcatgtgccaatccagttcattggtgaaattgtcagtactgtacttagacccaacatagaaaatgtggtgattctcttacctagaactgggacctgtgcgggattgttaatttattactggaccttcctgcgggagtgattatcacatatgcctatgttcagcacctgagtgatatgattttgctgcctggtcccagtctgaagataagattgtgatttatcactggatccagcacctcggtgatttgactcttctttttttggggacccaacaaattttaagtattgtcaattttgggtgaatcctgcacccatgttatgtgactctcccaaatgtgccttacatgttgtgccatattggggctcaatatatcacattagacattgttacatattgctgggttaaacacccaggtgatgtaactttttttttctgggactgcgtgcaggggaccttgtgacataactcaatgtccatcaccatactgatgttactctcttctcctgcctggtctctgctcacagagaaattgtgacagattactggcctagcatctaggtgatgtgactctcctctttttttcaggctccgcatatttgggtattgtgacatattgctgaactcaacacctaagggatgagagtctcctacctgtgcccttcctataggggacattgtgacatgtctctgcattcctcacctaggagatgtgactctcatcttctgcttgcaccctgcctacatggaaagctgtggcatattgctgtggtcagcaaccagatgatgtgtttctcctgcctgggtcttaataaagacaggaaagatggttgacatattactgggcccagcatccaggtgatgtgggtctcatcttctgcctggtccctgcttacagagaaattgtagcatattgctacacccagcacctagcttatgtgactcttctcttcttttaggttttgccttcagatgacattgtgacatcgctgggccctgcattgacaatttgtgactcttctgcctgtgatttgcacacttgggccattgtgacatattactgggtgtgacactcaggggatgtaatttttatgcctgggccttgcctataggcggcattttgaaatgtctttgtggctgggtgtggtgactcatgcctgtaatcccagtactttgggaggctgagggaagtggatcacaaggtcaggagtacaagaccagcctgcttaatattgtgaaaccctgtctctactaaaaaaagaaaaatacgaaaagcagccagccatggtgactggtgcctgtagtcccagctactcaagaggctgaggcaggagaattggttgaattcgggaggtggaggttgcagtgagccaaaatcgtgccactgcactccagcctgggtgatagagtgagattccatctcaaaaaacaaaaacaaaacaaaaaaaagaatgaatgaatgtctttgcaccaatcccaaaggtgatgtgactctcttgtgttacctggtctctgctcacaggaagaatcgtgacctttcacagcatatggttgatttttttcttttatttcttactttttcctgcaggaaagatggtgaaatattaatgaactaagtaccaaagcgatattacttttttttcttggacctgcctacataatacgttgtgacatattgctgcgccctgcccatagatgatatgagttttctgcccatcaactattttatgtgactctcctcttttatcttcgttttgtccgtaggttagattgcaatatatctttgggcctgggtcatgctaacagaagcgacagtgatttattactgggcacagcccacagggttgtgatattcctgcttgactcctgcccaagtggtcattttgacatatctcttggccagtcgcctaaatgataggtctctccttatctttctgtacctgtccacagtaggaaatgtgacatatctctgggcccagcacctatgtgatgtgaccttcctgtcatgccaaggccttgcctactgtagtgattgtgccatatagctgggcccagctcctatgtatctgactctcattttcttcctgagccctatgaaaagatagcattataacatctttctgagcattttaccaaggtgatgtgacttttcttcctgggttgtcctctcagggcattgtgacatgttgctggatgcagcatttaggtgatgtgacttcctctactgcttggactctgaccaaaaagggattgtgatgtatcacttggcccagcacctatgtgatgggactcttttctcttgtctgggccctacaaacattttgcattgtgacatatagctgggtctgccacccagatgatgtgtcttctacgtaagccctgaccacaagagtattatgaaataccttttcattcatcacctaggtagtgatgtgactcttcgtcagcctctaccctgccataagggaattgtgatgtatcactggacccagcacctagatgatgtaactcgtattttgactggaccttgcatattttgcatattgttacatattattgggtctgacattacgggatgggaagctcctccctgggccctgcccacaggtggccttgtgacatgttttggatccatatcctatgaaatatgactgtcctcgcctacatgcttcatgcacaaagaaaagattgtaacatatcactgggatcagccaccaggtgtgtgtctcacctctcagggtgttgctcactgagagctttgtaacatatcactgggcccagcacccagaagatgtgacttgtggcctgtgctcatcttttcttttttttctttctttctttttttttttttgacagccaggttggagtgcagtgatgtgatcttggcttactgcaacctccgcctcttgggttctagtggttctcctgccttagcctcccaagtagctgggattacaggcatgcatcaccacactgggcttatttttgtatttttagtagaggtggggcttcaccatgctggccagtgtggtctcgaactcctgacctcagttgatccacttgccttggtctcccaaagggctgagataactggcatgagccactgcatccagtctgcctgccaccagcagccatcttatagaaatagattttaatgcatccctgaccaggtacctaggtgatgtgatatgactctcctgtctggttctttccttcaaaaaagattgtaacatctttagacaagccccaggtgatgtgactcttctgcttactctctactcactgatgtaattgtgacatatatcttgccccagcttgtagttgctatgatgattctcacaccttgaaccaggcaataaaagagttactctctctcctagctaggcttaggaaaacaagcacaatccttagtctcctctttttgccaaggtcctagagaattaccactctctcacatattgtataaagctctcgggtggcacagacagtgtcatcaaggaacaaaatcacagatgatattgtgttacttttttttttttttggagacagagtctcgctctgtcacccaggctggactgcagtggcacactctcggctaactgcagtctcagtctcctgagtagctgggactacaggcatgtaccaggaagccaaactattttttgtatttttagtacagatagggtttcactatgttgtccaggctggtctagaactcctgacctcaggtgatctgctggcctcaggcttggaaagtgctggtattacaggcatgagccactgcgcctgccccccagcttcttttttgtatgtatatatttatttattttttgagatgaagtattgctctgttgcccaggctggagtgcagtggcatgatctgggcccactgcaacctctacctcccgggttgaagcaattctctgtctcagtctcctgagtagctgggattacaggcgcccgccactgtgcccggctactttttgtatttttagtacagacggtgtttcaccacctttgtcaggctggcttggcacttctgacctcgtgatccacccgcctaggcttcccaaagtggtgggattacagacgtgagccgctggacccggcctgattttctcttgaacaataattttatgtattgttaatatacataaaatattttggttcacattttgaatacattgaaaaagaaagaaaaaagagaattttcccatgttctggggtgggcctggctcagttcagggaggaagtcctccctgaaaaggctgcaacttaggctgtctctcttgtgttaggctgatcacatcttctgtcactcagggccttgagaaggtggggtcttgaacgatatccagtcagcgacattggactggaaactgtccaatcacacacacaactggagcagacagagcgacttccaggttgtagttggggggactgtgtctctagctgcagatggagctccaggtgtcgtcttcactgctctgtgtcctctgacttagagtcccagcctgtgtggccctgtgacctgcaggtactggagatccacagcaaagacgccaggacccgctgaaagcctagaaatggtgagattgccagttccgacatctggagaggggcaagggctggttggaactggtgggaagcagctgtggtgggactcaggcctccccgcagtcagctccacaatctgcaccctgagttctccttgcccaggttggcatccgtcccctgcagccataagatggcagctaggctgacagccgggcccccgggcgtcctgtcttcccagtgcattggctgtgccatgtcctggagccctctctgggcagctctgcaccagtagcgccacatctctcccagattgtgcagggaccacgggagaatcatcagggcagaatcctgactcagggttattaaaaatgtatgggtgtcacaatgaaagtattaaataatttaatcaaagggtgattcaaaaattgtagagcacccagctatggttttaatttatggtctgtggaaggggcttctcgaactcctgacctcaggtgatccacccatctcggccccgtaagtgctgggattacaggcatgagtcactgcgccagccctagtttcttaatttttacacatcagggtggaaatatcttggttatgtaatcagagtttaattggcagtttatagttggttaagcctgaagcttgtttccggcaatgtagtaatttaccaaaaaatgctcttgagtttagattattttttagaagtacaaatccggggactagagccacctcagtctaattgcctgccacttaattattttcacactccaatggtgacggatttttccctgaatttttcacatgtgtgccaagcaggacctcaagtccacccctcatcccatattcctccagcctaactctggcttacagcaaaatactaaatttccagtttcgtctgatattcccaaatgccaatttcccctccctaattcactttatcaactatttgtccttgagtgtacatttttatattattttaatcttttcttttttttttttcttattgagatgaagggagacttgctctatctctgagactggagtgcagtggcatgatcttggctcactgcaacctccaccttctgggttcaagcaattatcctgcctcagtctcctgagtagctgagattataggtgcctgccaccacacctggctaatttttgggtttcaccatgtttgtcaggctggtctcgagctcctggcctcaggtgatccacccaccttggccttccaaaatgctgggattacaggcatgagccactgcgccctgccgactgattgtttactacatgatttttcatacaaataataaaataattgtctgaaaggaataaatgattttgcttttcttactgagatataaaatgtaagcaccttaaaagtttcttcccttatgtgaacactgtgtttgagtaatattgctgaatttttctaacacttagtttcacaaaccaagttaataactctgacatggaaattaaagcttaagcccagtgactccaagctgaggctaatattgagcctgcaaaaggaggttattaaggcccagttccttttggggaacctcccctgcaaatttcccaacctgattatccaagacatggaagaagcctctatactgagagaaactacagagccttggaatgctggggatccacaggcagatgcagataaggttaatataaaggagattgggagggtcttactgaagatggagttgttattgttttgaggcagtttctagacttttaaaaataaaacagatgtatataaaaaattgaatttcgaaggagtattgcaacaggagaaagtagcaactaagtttttttgtttttgtttttgtttttttttttgtgacagagtctagctctgtcacccaggcagcctcctgagtagctggaattacaggcgcgcaccaccaagcccggctaatttttgtatttttagtagagacgggctttcaccatgttgatcaggctagtctcagactcctgacctcgtgatctgcccgcctcggcctcccaaagtgctggaattacaggtgtgagccaccgcgccaggccaagagttttaaagattgcaaagattaggcagaaaagggctttgccttccagagaaaagcaaacaagattagaaaggaggttggaggggaatgtttaaattgagtgtaataaaatcagattttagattagagaatgttttacccggacgtcagtatgttcttaggagggacataaaatggggttgtatggtggctcagactgagggtaagctcaaagttcatatcctgtgggaagagaataaacctaagcttgattaagaagtattttatgttgactactgaagacaaagtcagcttgtttttcagtgagtaaaaagaaaaagtacaaagcgtttttctggctgtgtgataggtaagaaaacagcaccatttcagtcataatggaaagaggtggctttcttttttttttttttttttttcccttaaagtcttcctggagaacacaaaggatgagaattttattgatcacagctgtttctcacctttgtgcttcatcttttcccaccttttttcttggttcaatacatttatttcacttttttggggttatatctttttttttttttgagactgagttttgctcttgttttatttgtattttattgtattgtatttgtattttattttctttgtattttatattatgttatgtattttgtttggagacagggtctcagtctgttgcctaggctgaagtgcagtggcatgatcttggctcactgcagcctcaaccttccaggctcaagcaatcttctttttttttttcttttgagacagtctcacttttgttgcccagactggagtgcaatggcgtgattttggttcagtgcaacttcctcctccggagctcaggtgattcttctgtctcagcttcctgaatagctgctattacaggtgcccaccaccatcatgcccagctaatttttgtatttttagtagggacaggatttcaccatgttggccaggatggtcttgaattcctgacgtggtgatctgcctgcctcggcctcccaaagtgctggggttacaggtgtgagccatcccgccaggccaagcaatcctcttgtacctcagacttccaagtagctgggactacaggcatgcaccactaaacctagctaatttttcttttcgtatttttttagagatgggatttttccatattgctcagggtggtcttaaactcctgagctcaggcaatccacctgccttggcctctcaaagtgctgggattacaggcatgagccattgtgcctgatcataccgtattttctttattcagtctaccattgataggcattcaagttgattccatgtctttgttattgtgactagtgctgcagtgaacacgcttgtgcatgcatctttatgatagaataatttgtatttctttgggtatatacccaattatgaggttgcttggtgaaatggtaattctgtttttagttctgtgaggaattaccacactgctttttacaatggttgaattaatgtacactctttaacagcagtgtataagtattcccttttctctgcaaccctgacagcatctattttttaactttttaatagcccttctcactgatgtgagatggcatcttgtggtttttctttgcatttctctaatgattattgatgagcattttattacatgcttgttagccacgtttgtcttcttttgaaaagcatctttttcatgttttttgtctacttgttagtgaggtcttttttttcttgtaaacttgtttaagtttgttatagattctggatattacacctttgtcagaagcatagtttgcaaatatttcctattattctgtggttgtctgtttactgtgttgatagtttcctttgctgtgaagaagctctttagtttaattaggtccaatttgtcaatttttgcttttgttgcaatggcttttggtatcttcatcatgaaatctctgccagtttctatgtctagaatggtatttcctaaattatcttccagggtcttttataattttcaaataaatatttcagcctttaattaatgttgagttgatttttgtatatggtgtaataaagtttcagtcttctacatactgctagctagttattccaccaccatttattaaatagggaattctttccacatttctattgtcatctttgttgaagatcagatggtagtaggtatgtggcattatttctgggctccctattctgttgcattggtctatgagtttgtttctgtaccagttccatgttgctttgtttactgtagctctgtagtataatttgaagttaggtaatctaatgccttcagctttgttgtttttgcttatgattaccttggctattcggactcttttggttttatatgaattttacaatagttttttttttttttttagttaaagatattttggtcatctgattagaatagcattaaatctgtaaatattggggttagtatgaccatttttaggatattgatattttctacttatgagtgtaaagttgttttccatttgtttgtgccatttcttacttctttaagcgttgttttgtaattcttatcatagagatctttcaccttcctgattagctgtattcctagatattttgttctttttgcagcaattgttaatggtattgtgtttataatttgtatttggcatggatgttgctgatttacagggatgatactaatttttgtacatttattttgtatccttaatgatactgaagttgtctgtaagtttaaagagtttttccaccaagactatacagttttccagacatagagttatgttgtctgcaaaaagggatagcttgacttcctctctgtttaagttcctttttttgttgtcttttgcctgattgctctgaccaggacttcctattttatgttgaatagaagtgttgagagaaggcatctttgccttgtgccaatttttgaggatgaatgcttcaagcttgtttttttcctttatttttgagatagagtctccctttgtctcccaggctggattgcagtggcacaatcttggctcactgcagactctgccttctggtttatgcaattctctttccacagcctgtaaagtaattgggattacaggcacccctggctaatttttgcatttttagtagagatgggattttgccatgtcagccaggttgatctcaaactcctgacctcgggtgatccgcctgccttggcctcccaaagtgctggaattacaggcatgagccactgcacccatctgcttccaggttttgtccattcagtatgttggctgagagtttgtcataaataacttattattgtaaagtatgtacttttaatgcctaggtttttgagtttttaacataaaagatgttatattttatcaaaagccttttcagcatctattgaggtaatcttgtggtttctgtctttagttctgtttatgtgatgaatcacatttattgatttgatttgtgtatgttgaaccaaccttgcattcccaaaataaattctacttgatcatcgtgggttagcttttttgatatgctgctaaatttggtttgtcagtattttgttgaggatttttgcatgaatgttgaaagatattggcctgatttttttttttttaatctcagccaggtttcagtatcagaataatgctgttcttatataataagttggagaaaagttactttttcttaatttcttaaaatagtttcagtagaaataataccagcacttttttgtacacagctgtgaatctgtctggtccttggctttatttggttggttggctctttattactaattcaatttttgagcttcttactcatctatttagggctttgatttcttttttgttcattcttggaaggatgtatttgttcaataatattttcattttttttagattttcttgtttgtgtgcacagaggtattaatagtagacttaaatatatttttgtggggtcaatagtaatgtctcctgttatttctaattgtgtttatttggatcatcccttcttccttcattaatctagctagtggtttatttatcttattttttttttcatagacttaattcctggatttcttgatactgattttggttatttcttgtctgctgctagcttagggattgatttgctcttgcttctttcattcttttatttatgatgtcaggttgtcaaatgaagatctttcaaacttttttagcattaaatgctataaatttcccttttaacactactttagcagtattgcagatattctgatgtgttggttttttatttttatttatatttatttatttatttattttgagatggattttcgctcttgctgcccaggccaagtgcaatggcacgatctcaactcactgcaaccactgccttccaggttcaagcgactctctggcctcagcctcccaagtagctaggattataggcatgtgccaccatgatgggctaatttttgtatttttagtagagatggggtttcaccatcttggccaggctggtctcaaactcctgacctcatgatctgcctgcctcggcctcccaaagtgctgggattacaggcatgagccaccatgcccagccctggcctgtttttttgttcttatttgtttaaaagaacttcttggtttttgccttaatttcattatttatcaagaagttattcaagtgccggttgtttaatttttatgtaattgtatggtttcaagttgttttctttttgttgaattatatttttgtcaagctgaagagttctgtagatgtctattaggactatttggtcaagtgttgagtttaggttctaatgttttgttaattttcttcttcagttatctgtctattagtgcctgtgggatgttgtagtctcccactattgttgtgtcagaatctaaatctcttcataggtctctaagaacttgctttattcatatgaacccatgaattttatataacacctttctcttttctgctttttcttccgtaaacattctttcctgtgtgcacaatgtgcaaaatgtagatgtccatgagttcaagaacatgtttagagacctagctgttgtaaaagaaaatataaattagaaataagaggcttaattagtccacataaaaataagagaaaatatcttactaaaatctcttttcttaaaacacttagattatgtgtagatttttatctcctttttttgaaatatatgtaaatcattaacagctaaataaatctttgttatgtatttattttttttttactcacgattgtctttatctgggacctgagattaattgctttgtttctgctttggcaaaaggttattcttattatttttagtcttttaaagttgacacagatttgttcacagtaaaactcattccaagagcacacaaaagtttagcataaaaataggattaaatttagcaaaacagaattataaggactaaaagatattggtaatttgattgacagaaacctgtttatccaacatgattatttacaggctgaagtacttacactacaaaagcaaaaatagtacagtttataaactgaacagtggagtatattgtcataccttggtttctatttattacttcagtacaattagcatagttatgtgtggtgttgttagacaacctgcattcatatacatttaatagtattttctacaatagtatgaatataaagccacaatgtctactttgaatgaattccttaattcttttattattgtgattcatacttttgaaatgtaaagtttttcaattgaaatacagttacagaaattttttaaaaaatcctacatacattatgactagtatgttaaaattattcctacttacatatttatatctaatatccaaagaaattttactaccacattgttacagtagatattagtctgctatgcttattaatttaaccaatagagataattataagtaagcataatttcaatgtctttcatttcacaaattggaatgctgctattgtaggacaaataaagacagatgatgtggccacccaaaaactgtagtagctctccagttagctaccttgcaggttcatgtatattccactatattaacacagtcagattttaattttttatcaaagtgctggtggaagttgtcagatatatttgaatatagattctgcattcaaaggctagaaaattagagagcagcagagatagaaaaaatattttatgattctgctgataatatacctcttttcttcataatactcatgtttctcatgctgagagtagctatgcactttgggtatttagagagaaattgtttttgcaggaatattttctggctgacttgatcaatcttatatctaatttcagttttttcttaagatgcttttaacttcttttttttctctcaatataatctttctcagagtgagagctgtttttctgtagaatgctttgtgtatctgttttagaagccctattagtatcccataatgtctgtgaaagacgtggctgtcacagtgagaactcttggagctatctctatctggatgcatgctggaaatctagcagtatattttccatgtcaccattataaatagaaactgtggcttaaataatgctctcatttccgttattgtgaaggtgcagttctacccagggaggctctcttcctgcagctcaggcttcactctttgatgtgacactaaagtgctgctatggcaattggcgttcacctatgatgtgagctgccagctgtgagccctgtgctgtggtccataccgcagtggcagatggtaggaaacaaaagaggacactggccaccagaagaggggaagccggagtactgtaaccccgtcctcagggaggagagaggtactgctttaaaatgcaagtagccaaaaagatagcaccctattcaaccacttttgtagaagagtgaaagtctgccttcagcaggcagctggcttcaagttgcagaactatcttgtcaggaagatgtgaaaaggttattttgtcattgaatataaccaattagcatatatggatgacctccccaatgtccaggtgaatttaggatgaactatgtatgacatggtgctgtgaattcttctacttgtgaactatttatggtaaccatctttatgtcttttcgatctcttaagcagactgactgtaatacatttgacattcagatttaattgtgtaatgaaagagttttctttttctttttttttttttttttttgagacagagtctcgctgtatttcccaggctggagtgcagtggtgtgatctcagctctttgcaacctctgcctgtcaggttcaagtgattctcctgcctcagcctcccaagtagctgggattacaggcacatgccactatgcccgtcttttttattttattttatttttttttattttagtagagatggggtttcaccgtgttagccaggatggtctctatctcctgatttcatgatcgacccgccttggcctcccaaagctgggattactggtgtaagccagcatgcccaacctctttcttttctattattgtggtttctctggggctgaagagaatttttttaaaattatatttcctagaattaccggacataatataaacaaataaggtgccaaccaagctttactctagaggggactttccctctcaggcttctagccaactcacagttatgctgtaaagtgcatactgtcacctaaatatgcaggcagaattgtgtctctgcctatttggtatctatagtcctccacagtcacttctagaggggctagagcagatttctacaaactttttttttttttcttagatggaatttcactcttgttgcccaggctggagtacagtggcacaatctcagctcactgcagcctccacctcctgggtttaagtgattctcctgcctcagtgtcccgagtagctgggattacaggcatgcaccaccaagcctggctaattttgtattttcagtagagacagggtttttccatattggtcaggctggtcttgaactcctgacctcaggtgatccacccaccttagcccccaaagtgctgggattacaggtgtgaggcacctcacctggcctagatttctacaaacttaatagggcagatattaaccattttacttctttcaatgactcttgtatcttcagacctgaaactgattcagagaccatggagcccagaaacccaatcagtgtaacaagtgtgcattgagtagacatggagacatgagaatctccacttctctttttctcctcttgctaaaatgctcacaattgcaggtaacacctgctgctactccacccatccaggacctaaatctgcagctccaaattctaaatctaggtctagaaattaaaaaacaaaacaaaacaaaagtttcatttgagaaatgcaagtctttttttttttaggggagggttgggggggatggagtcttgctctgtcaccaggctggagtgcagtggcgtgatctcggctcactgcaacctcttcctcccaggtcaagctattctcctgcctcagcctcccgagtagcttggattacaggcatgtgccatcacacctggctaattttgtattacttttttcagcagacatgggcttcaccatgttggccagtatggtctcgatctcttgacttcgtgatccacttgcgtcggcctcccaaaatgttgggattacaggcgtgagccactgtggctgtctgccagtctttttacttataaaactcagacattaaaataagagcacaattatgtctttctccctactttcaactatatattgatctcttgaagctgttcactattgccaaaagtaggtataagttaaaccaataataagttatttatttaaacaaataagaatttctcacaaactagtttgtatcaccccactctctatctctcttctttttttcccttcacaaatccacttgtaattgctgctaatcagtatagattccaggcatcttgaatatttcttctcaagttacaatgcttaagcttggccccaataaactgtgtacttatattcatgttgtgtcagcttttttttaggtaaaatattatttagaattttctagagcagtctctgtgagtagatttctcctttgattgtactcgctgtaacagccaaaaatgcaaagtgatgttgattttatctagaatctgcacataaggtctggtctctgcctggaatttacaagacagggccagactttagattgagaatgtacagaaaaccaacaggaggcattttctgcattgtgagatgtccacatagacacttcagatccctcctttgagagtgtgactctttgaccttttcacattgctacctttctgtgagaggctacaggtttaaatagaatctgatggcagaatctctaagtgtaaacaagcatcttaggagtgagagatcaaggccacaaagtagccagagccctgagcacaactatagctacctggaaaatgtgatactagagtgttattgtccaaaagctagctaatcaggacaggagatccaggttctggagctccaccaggatagtttcattttctttttagaatcagcctgagtctctcctgctggcttattattggtccatcagcccagggtcactggaaatgctctcacaatcacccaggcatctgagacatttgagaatctccagaacaattgtgtcaggctgacaagagtggttaattttgcttctgtcttactgtaaaagaaatgaatcatctggtgtgtgttcctcccatcatacaagagatgtctttggttggtacccagatgagagtttctctggttccctggtacttgagtgaaaaacaaggaggaggtctggagactcaaacagataaattgattccatttcatatagtcattagaaaaatagatgaagcagtcatggtccctaccatgcaagaacttttagtcttgactatcaactggataaatgatttaattatgcatcatatggtgggtacaataaatagacatgtgcaaaaatatgggatatatttgcaccattttctttatattgttaagacttctgatgtctacacctgaacatatatttataaacaagagttattatttgcattttttagcttgctaagaacacttatttatcttctaaaaaactattttagaaaaccttaagagatttgttaaattgcttattagtatgtgatataaccttgagaggggagtggggtttaaaaagattaaaaattatacaaactctgagatttaattttttttttttttggtacacttaaaaaatgaaacagaactgaaaatactccccagtggcacaaaaaacagaattttacattagctctacaccctgtcccaaccctgatcagattcaccctttttgaagaccttatttaggtgtggccatactctggagtcttgtctcacagaactaactagaagagatcagagttttgggtgatgcatcctgttgcttttttagggttggtgctcatgattttctgaaacccaaaagcagataaatggaaaatataaaatatgatttatagggtcttaattaaaaaaattttttttaaaaccattgtttgcagagacattacatttagcaacttgttttctctccctgcagatatagttgttgattcacaaatcacaaaatagtaaatataaacacaacaaaaattcatctaaattatatgaaactctatctgtatccctctcatctgtctatatttatattctatacattttttaaaaaaaatcagtgacagccgggcgcggtggctcacgcctgtaatcccagcactttgggaggccgaggcgggcggatcacgaggtcaggagatcgagaccatcctggctaacacggtgaaaccccgtctctactaaaaatacaaaaaaattagccgggcgtggtggcgggcgcctgtagtcccagctactcgggaggctgaggcaggagaatggcgtgaacccgggaggcggagcttgcagtgagccgagatcgcgccactgcactccagcctgggcaacagagcgagactccgtctcaaaaaaaaaaaaaaaaaaaaaaaaaaaaaaatcagtgacagataaacagaagaagaaataaaaatgctgggttcttattctaaatccttggaattattgaacacagtataaactcacagggttttatcagaattaaataatgggtcatcacagtgctctgtaacgtcttattgagaacacagtacctgcttaataaacattgcattagtacatgtgtacatgttgttttctaaatgcagacttactcagaaattgctgctttctgttttctctgtaaactttaaagagccaggaaataatatgatactttaagataaagaatggttgtcttcatttgtatcaaaagtatttgtgttgtgacaagactgctgaatataagggactctgtcctgtgcctcatttttctttttcttttttttctttttggagacgagtcttgctctgtcgcccaggctggagtgcggtggcgccatttcggctcactgcaagctccgcctcctgggttcacggcattctcctgcctcagcctcctgagtagctgggactacaggcaaccgccaccacacccggctaatttttgtatttttagtagagatggggtttcaccgtgttagccaggatggtctcgatctcctgacctcgtgatccacctgtctcggcctcccaaagtgctgtgattacaggcgtgagccaccgcgtccggcctgtgcctcatttttctaaacagtgctaataatgagcccagagagagcgacatcagcactgacaggggacttctttaaaacacccatttatggaccctttccaaacccacagaatcgtattacatagagtggggccaaatttacgaagtgatttataagctcattaaagcttgagtagcaatgcttaggtaagtggttataagcccagacttctaattagaatcacatggccaatttgcagaactctcttgtgcccttttcacagtttgcttaatgttctgggtgaaagcatctatttgttttaattaagtgtctcatgtgactctaatttgccagaatcaagtatgacgagttcaagatacatttatgagagttaagtgccgcctttgcactaaagaggggtccaggaacctgttctgtttgggtttgttaaggacaggacagtgtggccaatatttctattactgtagcagaaattgctagtgtctgtagcagaggagagaacctgaggaccaaaaaaataaaaagcacacacacacacacacacacacacacacacacacacacacactttttttctttttttttaagatggagtttcactcttgttgcccaggctggagtgcaatggtgcaatctcggctcactgcaacctccacctcccgcgttcaagcgattctcctcccccagcctcctgagtagctgggattacaggcatgtgccaccacgccctgctaattttctatttttagtagagatggggtttcttcatgttggtcaggctggtctcgaactccctacctcaagtgatccacccacctcagcctcccaaagtgcaggattacaggcatgagccaccttgcccagctgcagagaaacttatagttcctaaatcatttctgttataaaggacagaaatgggtagagtttttctgtcttgggctttctgcctttaggtgtggtggtaagagatgaacatgtggtgctcaaagtttttaaggcatattctcaagatgcaggtataattagtccagaaaatgtcatctgagaaataattctagaggaggaggagaaagagaaaaaatgactttttttcagctaaacatttctgacatcaagagctgtgtccgctgtgcctcctggattgccatgtgcttagtatgtgcaaatctttacttctaaacttgtgttttttctccctaatgagtttttcttaactacttttataaatgcttgtgatagtcaagggtctctgaaaaatatttcgtttctatatatcacagacttctctacatcacgacttcttatatgccgtgcagaattctcaccatgaattcgtgatctgcaatattaaaaatgttgtctttggctgttgaacatggataggtgtggattatctatctgtctgtctatctatctatctatctatctatctatctatccttctttctttctttttttttttttttgagacggaacctcactctgtcgtccccgctggagtgaagtggcatgatctcggctcactgcagcctccacatcccgggttcaagcaattctcctgcctcagcttcctgagtagctgggattacaagcatgcatcatcacactcagctaatttttgtatttttagtagagacggggttttaccatgttggtcaggctggtctcaaactcctgaccacatgatccacccgcctcagcctcccaaagtgctgggattataggcatgagccacagcatccagcaatgatactctagatttctatggggaaaacctgggattcttagtaaagatggagaacatgtaatgttgaggttccttctgtgttcttaatggcattacaccattaagaaaatgctcatttaaacagaatggcatttattacccaaaaagttctgagaaaagtggctgggtgatgtggcttatgcctgtaatcccaaaactttgggagactgaggtggatggatcatgaagacaggagattgagaccatcctggctaccacggtgaaaccccatccctacaaaaaatacaaaaaattagccaggcatggtggcacgtgctagtagtcccagctactagggaagctgaggcaggaaaatcacttgaaccttgaaggcagaggttgcagtgagccaagatcgcaccattgcactccaacctgggtgacagagcgagactgagtctcaaaaaaaaaaaaaaaaaaaaaaaattaccaggagatacctgcttatttgggtgctaaagagagactacttaaagtcactattaaaaattgtagaacatggaaaatatctctatcttggactttccatataaccgatgttttcttatggttaaattgagactgtaatttactttagtggggggccatatctcagtagtgatgctgtgtccttctgggtgcatcagcacactatgaaaacttgttcgagtgcatttgatgttaataactcacttgcttaataaactctcttacagatttttgcactatagaggttttttttcctcttcatcattaagtatctttatgcagctgatgtccatacaccatcacatttaatctggcagctgccctgtttttgaggttttctttgtatttatctttctttggtaaatgaaagctctcatctttgtttacaggccagaaaaactgaaaaagacacaggctcttccacttactggatgtttgacaaaatgatattttggggccaaaacattggcattactggtaaacttggtagagattcagtaactcagactttatttcagatctcctgaaaaaataatctgcattaacatgatgtccagtttattgtacacattaaaatttgagtggtaccttctaagtcaacatgtctattttgtctgaaaaatgtaaagaactatgtctttttcatctgaaaaacatatataactcattctgtattatgtaaatatagtactcaaaaatgtgcatgttagtgtctatgccctcaattttatactttatcatccagacaagtatcatatatacactgatgttgtggatattatgccactctcttttctcagagttagagaatacattagaaaaggtttgtgtgttgacaattattttattggataatttcagtcactcttataagtcagaaccagttttttttactctctcattttgccttgagtcaaatggaaaattctgccaatggccactttgtacatatgtgtgtttgtgtgtcttttccagggactcttgacgtttaggtatgtggccatagaattctctctggaggagtagcagtgcctggacactgcacagcagaatttatagaggaatgttatgaaaacctggccttcctgggtgaggataactttaatacaaaattccttatataaactaaaggtttcatttctcttttgtagaatgttttctggtaatttatgctttcaaatttctgttttcaagaaaatcctggggatttgtctgtttagaaaagaatttcttcaagatatttcatcttgacctgaactttccacattcctgagcggatctgtgtccttcactttagattattggtaatttcagaagtttagttgcataaaatattgttactcacaccttaaaatctaattatcatcaccagtttttgattcagtagtaccaggcagtgaaattaagaacctacaaaattaattttttttttttttggagatggagtcttgctctgtcacccaggctagagtacagtggcatgatctcggctcactgcaacttccgcctcccaggttcaagcgattctgcctcagcctactaagtagctgggattacaggcacccgccaccatgcccagctaatttttgtatttttagtagagacagggtttcaccatcttgggcaggctggtctcaaactcccgacctcgtgatcccagcctcccaaattgctgagattacaggcgtgagccactgcgcctgaccaataaaagtattttctaaatagttaaacatttctgttataaattagtatattgggataaatttattagaatattctattatatcctctttactgaacacattactaagttggtaattggagaatatgagcaagattcatgttagttatttttaataaaacaggtattactgtctctaagccagacctgatcacctatctggagcgagaaaaagagccctggaatatgaagtgacatgagatggtggatgaacccccaggtaggttagagtgaatacaacagacaacatggatgagaggcccaaatcaagaagaaagcaagtctttaaagtgatttgggaagctgtgttcaaaaggaaatagtttctggaaagcctgaaatttttaaaaattatactctcacgtaggggcatcttatgtcttatgtttataaaatttctaagaattctaatttcccttcagtgttcttccttcaaatttacagtgacagctaaagtactattcatgacatacaaaaagagtgcacaatctgacttttttcttgtttttgtggacagagagatatctccataattttgagatactctatgttaaactattttttaagttctctttttacatcacgtctgaaatgcacgagagtgacggtttctgtttcactggttttcttgttcattttttctgcacatttcatcctgttttcattaccatagttttgaaatatagtttgaaattataaagtatgatgtccttctgctttgttcttttttcttaagattgctttggctattcaaagtttattgtagtttcatctatgttttagggttgtgtttttcattactgtgaaaaaaaaacactggaattttgacagggagtttattgaatctagagatcactttggataatatggcagtttcacaatacttattctttcagtagaaataaaatatttttaaatttatttgtgtcctctaatttttttcattgatatatctttcacttaaaagatttacaagctccttgtttaaatttgttctaaaattaattatttcattgctattgtaaataagattttttttctctcttttatcagaccgtttgttttaagtgtatggaaccataacttatacttgtatgttaattttatatttttagtttaaacaagttttaatgtactgtttatgttttttttttatatataagattacatggtctaccaacagcaatgttttacttttggtcttcaatttcaatgactttaaatttttcttttgactatttcttcatccacatactttcagtgctatgttaaaatagaagcattgacaataagaaacaattgttttgcaatggggtctgtaaatttaaaggagcaaacacctcttcaagattttataaactggtttcagagagcaaaaataaatttttgtttggcccccccaatgtgatagaatgccctctgggtttgtggtgaagaagggttgtagcttggtcttaaggctgctgggtttgcacaagggttcacctttagttgtcttgttaaaaggggcttggataggctgggtgcggtggctcatgcctgtaatcccagcactgtgggaggccgaggcgggtggatcacgaggtcaggagatcaagaccatcctggctaactcggtgaaaccccgtctctactaaaaatacaaaaaaattagccgggcgtggtggcaggcgcctgtagtcccagctactcgggaggctgaggcaggagaatggcgtgaacctgggaggcagagcttgcagtgaaccgagatcgtgccactgcactccagcctgggtgacagagcgagactccctctccaaaaaaaaaaaaaaaaaaaaaaaaaagggaaaagggcttggatagttgtagttttcattttcatttaatttttggacagagtgaatatctttcaggactttgctgtgtattgcagacccaggggcaggtttctgcagtcgggtctgcatatggtgttctttatatcaggatgtgatgagagtggctttcactgagtacaagagagaattttcccaggtcactttgggtttctacataggcagaaccggccatgaactgtggctcagggagctggaaatgagtcatggaactgcctcagggaccacagtaaaggccaaggtctgcaggcctctcagcatagctataaatgggtgtcttcctctaggcctctggaagagcaggacctcccccagactgtgactgggaagagtttgggatggttacagagtaagttcagaattctcactggaaccaagttaggtggaacgttttcttgtctgtagccaacaacagtagtcctgtagtttgccacctgaatgagggcctgccttctaaacagaattatcttcaatattgggctttagcagagtttcacaactcccttcctggatctcagaactctcttaaaggcacttttttttttttttttttgagacggagtcttgctctgtcacacagactggagtgcagtggcgaatgcagtggcacgatcttgactcactgcaacctccggctcccaggttcaagtgattctcctgcctcagcctcccgagtagctgggattacaggtgcccgccaccacccagctaaattttgtgtttttagtagagattgggtttcaccaggttggctaggctggtcttgaacttttgacctcaggtgatccacccacctcagactcccaaattgttgggattacaggtgtaagccaatgtgcctggccaaaggcacttatttttgagatggggtcttgttacataacccaggcaagttttagtattttgactgtaagcaattctttaatgtatcatgtagctgtcattactggtgtaaaccatgatgcgtgattctcttaaaaaggcattttcatcaggaatgactgacaaattttcttgctgtcaggggataagcaaataggatgccttttttttttttatcttgttaatgtcactctccatataaatttttactttattttctactttaaatttgtctgcaattttagattcagacatttagggcaatatactagaatttacgtgttgtgcctgaattaaattaggtaattagtatgcaggcaggcaaaaaggaattataaaattttcaaccacttttgtcagcctatatctaaataataacatagtttatttcccaaatatttgttttatatatgaggctctaaccatattctgctaaatatatgtataatttagcaatgtaaggtattatttgcttctatatttggattagttttattttgttcaaaaatagcaaacatttaaaacaaaaaattgtcagtagtttcttttaaaagcttatccattaaaggtttctcattagcatctcctgtttatgattgtatttccttttctctgaaattttattgccatacaatagatatcagtaatttaaaatgcctgccttccgggaatgcacagttacagtcaaacattgcagttatctagacaaattatttgttaatgtacattgatgttgccaactagattttatgagtaaacatttattattgtcttgtagttctatattgtggttttttactataaatttcttaatatcagtttattgtgtttttggttttacttatgtattataattttagataattggcaattctgtttgtatactttaagttaatgtggggtttaattaaaagataaatgggccatatgtctatcacaatcagatatgtgtgtgtttatatctgcaaatgtgaccccaatttttgttgtagcttatcttgtatatattctttcttagctcattctctttttctctttttttttttttgtttatgtttttgagacggggttttgctcttgttgctgaggctggagtgtaatgcagtatctcggctcactgcaacctctgcctccagggttcaagcaattctcctgcctcagcctcccaagtagctgggattacaggcatgtgccaccaggcctggcaaattttgtatttttctttattagagacggggtttctccatgttggttaggctggtctcggattcctgacctcaggtgatctgcccacctcagcatctcaaagtgctgggattgcaggcattagccactgggcccgacctcttagctcattttcaatgttggttttatcttgtctaagtgagtagccttggaaatagtctcattttcgtcatgtgtttaatgatgaatatgtatttcctttgtgtgagacaaacactttgtgatttggaggtaatttttaaaaagatttataatttggtatttttttcagttttttaaaaagtaactgtaaaaacatgtaacatgtaatttagtttcttaaatctatttaaatatacatgtcacagccaggcatagtggtggctcacatctgtaaaaccaggattttgagaggccaggacagaaggattgcttgagcccaaaagattgagaccagcctgggcaaaatgtggagacaccctctctacaaacattttttttctaagaaatagccaggcagggttgtgtgtacctgtggtctcagctacttgagagaatgaggggcagggttacttgagcctgggactgtgaggctgcagtgagccataattgtgccacgcactcaagcttgggtgacagattgagaccctgtctcaaaaaaaaaaaaaaaaagttgtgtatttcaggtatgttaactatattcacattgttatgcaaaagacttctagaaattttatatcttgtaaaactaagactcaatatccattaaataacatttactcattttatgctctctccatcccttaacaaacacccttccactttctgtttttatgagtgtgactattttatatatcttacgtaagtgaaatcataatatctatgattttactactggctgatttcagttgacataatattttcaaagtgtatctttaaatgtgtcaagatttttaagattttttttaaggctgaataatattccattgtatcaaatatgtcttgaaggtcctatattgcatattttagatatagattaataaatggaattgctgtatttgataataattttatttttaattataagaagtacatttataacataaaataatggatgcctgcttgttttctactgacaatcaacacgggtttcttttttttttgagacagagtctcactctgttgcccaggctggagtgcagtggcatgatctcagctcactgcaacctctgcctcccaggttcaagcgattctcctgcctcagcctcctgagtagctgggattacaggcacgtgccaccacacccggctaatttttgtatttttagtagagatggggtttcaccatgttagtcaatctggtctggaactcctgaccttgtgatctgctcacctcggcctcccaacatgctgggattacaggcgtgagccaccgtgccagccagtccaacatgatgaaaccccatctctactaaaaatataaaaattggccaggcattgtggcaggcgcctgtaatcccagcttcttgggaagatgaggcaggagaattggttgaacctggaaggcggaggttgcagcaagctgagaccatgccactgcattccagcctgggcaacagagcaagactccatttcaaaataaaaaaaaaaaaaagaagttatcttctatgtctaattaaaagatttttcacttatagtttcaggaaataatcgaacttaattttatcagtattgatattcagtatggataattcagtatggatattcagttttaaaattatcttttttctattgtgtgctcatgtcaattttgtgggagattatttggccatattcagaagggttatttctgggctctctgttctttcatctgtttatctgtctttttgtcagtaccacattgtgtttgttattgctgcttttaatatgtttcaaaatcagaaattataatgcacctttgttctttttcatgggtgtttggctagaggtcataataaaattttaacattttaaacaatatttctttaaaaaactgctgttgggatttttatgaagattatattgaatttgtctaccactgtaagttgtattgacatctttgaaaaactattattttttgattcctgagcaaacatatgttgaagagtgtgttttattttcttatatttttggattttttttagttttaatttatagcttaattcagttttggtcagaaaacacagtgtataattttggtcttcttaaatatatttgttgttgttgttgtgtttgttgtttttgtttggagacaggatcttactctgtcaaccaggctggagtgtactgccatgattttgcctcactgcagcctcaacctaccaggttcaagtgatctttcctcctcagtgtctcatgtagttgggactacaaacataaagtaccatgtctgaataattctttgattatttgtagggatagagtctcactatgttgcccaggctggcctcaaacttttaactccaagtgatcctcctaccttgatctctaagtgttgggattataggcgtgagctacaccacccagctggcattcttaaatttaataaaacttagtatgtgtcctaacagaatacaccagatgcaaataagaatattgtatattctcttgcttttgactggaaagttttgtactcatgtgttaaacctagttggtctgtaacatggttttgatgttcatgttctccaaaccttattctgcagtgtaatccttaatgttggatgtgagacctggtgggaggtgtttgggtcatgggagcaaagtcttcataaatagctggtaatcaaaatgtttacactccattaattcaaatgtaagcaggtttattagaagaacctggctccttcacctcatacttgctctgtctgttattatgtgacatgtacagttactcttcgccttcaaccatgattgtaagcttgctgagacactcaccagaagcagatgctggcacacactttttgtacagtctgctggattgtgagccatataatctttatttctttataaattatccactcaggtattcctctatatgcaaaatgattaatacggtctgcaatgtcgtctaggctttgttttcttgttgattttttaatctgaattttctatttattattaaaaatggggtattgatgtctacaattatattctatgtatttcttgctttacttttgtcaatatttgctttatatattttggagaccttatgttatatatacatatacatacagataggtagatggatataatcattatagatttgtggtaaatcaacctattttatgagtatgtaatatcagtgtttgtctcatgttagcacttgacttaaaacatatctaatacacaattgtagttactattttcataaaatgtagttgttttttttttcgctctgtggttttcagcctatttgacttagtgctgaaatgattcccttgtaggcaacatactgtttgcttttttcttaagctagtaaagcattttattttttctttttataatttcatttatttacttgtttattcatttatttttgagatagggtctcactctgtcaaccaggctagtttgcagtgttgtgatcatggctcactgcagcctcaacttacaaactcagaagattctctcatttcagcctcttaggtagctgggttacaagtgtgtagcatcacgcctagccagttttttgtgtatttttggttgagacagagttttgccacactgtcaaggctgttctcaatcttctgagatccagtgatcagcccgccttaacctcccaaagtcctgagattacatttctttttattaagtaatttaatttatatttaaaactgcttcttaaaaatgaagttactggttttattgtaactgttttatgtgttcctgagtggtacgttttttcttattcactgttttattgccttaaattttattttaattgtgtagtgatgtgcttcaattatttttctaattttgttttgcacagtttctttaattattatctttataatcatgttgtctattcatgtgttttcatgctgctgataaaaacgtaccttaccctgggcaaattacagaagaaagaagtttattggacttacagtttcatgtgattgaagagacctcacaatcatggtggaaggtgaaaggcatgtctcacatggtggcagacagagagcttgtgcagaaaaactctgccttataaagccatcagatttcatgagacttattcactatcatgagactagtacagaagagacctgcccccatgattcaattaccttccaccacatccctcccacaacatgtgggaattaaagatgagacttgggttgggacacagccaaaccatattattttaaaaaatggagtttacattaaatatcttaaaattcaaacaatatactttaatgacaacttcaattgaatataaaattatacctctatgtttttcagtttgttattaacattaaaaatttttagactgggtgcagtggctcacgcctgtaatcccaacactttgggaggccgaggtgggcggataacctgaggtcaggagtttgaaaccagcctgaccaacatggagaaaccctgtctctactaaataatacaaaattagccaggcatggtggtgcatgcctgtaatcccagctactcgggaggctgaggcaggagaattgcctgaacccgggagggagaggttgcagtgagccaagattgtgccattgcactccagcctgggcaacaagtgcgatactccatctcaaaataaaataaataaatataaattattttgtgtatttattaacatatttatgcagattgtattctgttttaaatattttacagaggagctttaagggttttatgcatcattattatgatagtaaagacttctatatttgtatatttacatttaatatagacttttattttatatgtggttttgttagagaaaataggaggcaggagacacccagtaggtgaaactggaggattttattaaggtgcaccctggcacaatggattcgcatccaaaaagctgagccttggactaagacagggcttgtcttttatacatgcatgggccatctagtggcgcaaagctcgtggtgcaagtaagcaggctcacagaagcagaacagaggcagttaatcaaacagtgacaggttatgctgaccttgcagcttcactggaagggaaacatgaatttatcaaactaaagcaggccttgcagctggtacatgtcttactcaagctcgtcttgtaaccttgtcatgttatccagaacagagaaactggagttgttgtgaagtaaccttgagtttcactaaggaaggattactaaggggaggaggaagctaggagaggaggaaaaattgtttttcccatcattgctctatgggaggagaggggataaggactagttttctttacatcctctacttcatttccccctttgacgctttttataaatgacgtttaatagcatcactatgacttaatttttcatgaaaaggcaagttttcttcatttggcaaaggctgatatttagttagggtcattagttgtgtagtagtttgcctggttacaagagcctctgtggccatttagatgtttttgacaaggaggggtaagagacaagggagtatgaggcagactcctaatatggctagaactattcttactaaggttttaaattctgcaagggatgagaactaacccctgaagagggaatctggagaccatcctttctaagtcttgactggaatatgggctaatttttggattcttgcagctttttgtttgacgacctttccgttgtcatcgatttttagacagcaattagttaggctgaactttctacatactcctccctcttgggctaggaggtagtctaaagccagtctattttgataaacggcatttctcatttctgtagatttccgagccagcaaatttaaggctcttgcagtatcattcgtaatgatctccagtactgcctgcaaccatatgatgtgatttagcatgtaaataggggtgcggtatctccatgatccatctgcccatgtggctgggccatagtattgcattattctttcaggtggccattcattatctttaattctttatggttattccccttttatttcttttgacctgacatgaacctccaactaggttctaggtaaggactttgggtcataacatatataaggctggccacttcctgggttgcagattgagtaggttatctggttgtgtgtacaagttcctcaatgggtccctgcatacctataataagtggtagaacagggttctagtcatggtgcttcctgtctacgtattgtcagtgcagtgggggcatccttctaaggattctccctttaacgtggttaaagggaatagcaaaagtaatgaataacatgtttatacctagcatggagagaagaggtcctttcctagaggaggaggttgagcaaagcaacaggacaatagtaaaacaattaatattacaaggaaagtttccagacgtaagatttctaaccacttttactttcctgatgatgcctcgagctttggccgtacatagacgagtcagcttctggggtgactagaacagggctgttgtttcctcaagcttccaccgtgtgtagactggtcagcttctgaagtgaccagagcagggctgttgtagtcttcattggcacctcggtcccatcataggatcagctgggttggatggcctgggtccttctggctggtccacttgtcttgggctaccagtttcagccaactgtggtgaatccaaggcacgattcctgcaactttagcagcagtgagtagacaagattacaatatggggcccatcccatatgggtcccagtgttgttggattccattttttaaactaaacagagtccccgggtctaaagggataaattgggtctgtgaggcttatgggcattctttcccatacccagccatgaattttttgcatggctattcttaaagcctgcatctctctccttaaggctaattcctctagttcacagagatcacctttaaattggccgaacaagatctcataggtgaatacccagtttgtttggtgggggtgtacctcacttggaggaggaccatgggcaggacctgatcccaccttagatgagtttcttggcaaaatttttttagtagctgtttgagtgtctggttcatgtgttccactttttctgagctctgtggccagtaggctatgtgtaacttccactttattttcaataactgtgttagttcttgaactatcttggctatgaatgctggtccattgtctgacgctagagtcaggggcagtcgaaatccagggataatgtctcttaacagtactttagttacttctcgtgctttctcagtcctgatggggaaagccttgacccatcctgaaaaggtgcagacaagtactaacatgtttcaatatccccctgcttggggcaacccataagcagattttcacaaggtgtggcccctatttcctgcattcccagggtcctggtgggcccctgtattaggttgttctgggcacaagttaggcattgttcacaaatggctcatgtgatggcagtgagccgtggcacatagaagtggtgtcctaatagcgtctctagtgccgtttttcccatgtgagttccttggtggaattgcctcacaaatttggaggccaccatttcagggatggctagtctcacattagataatttccaccatcctccttcaatatgttctccagattcttgggcaaaccaggccctgtcacttagagagtaactccgggtctcctggaggggagattgcgggaggagaggcatggtcagggcttcttttctagagtgtggagcagtcaatgctgtctgtcttgcttctctgtctgcttttccatttcccttggcctcctgtgtccctgacttctggtgtcctttatagtgcataacagctaccttctctggggctcatacagcatctaagagctgtataatttcttctttgtatttatttctttgcccctggcagttaaaactcctccttatatatagcaatgtggcaaaagcatatttggaatcagtataaatattgatctttttgtcctttgctagcaaaagggctcttgttagagctatcagctctgctttttgggctgaagtttctgtgggcagagactgagcttccaccaccaagtgcaatgttactactgcatacccggcccattggactccttccagtacaaaactgcttctatctgtaaagtactcgatatctgggtccctgaggggttggtctgtaagatctctccagcttgagaatacctcatcaactgtgtctatacagcaatgaagagggcctcctggttctgattgaattgggagcaaaatagctgggtttagagtgttcacagtctctagagttacgtgaggatttttacatagaagcccttgataccaactcattattggatttgataaccaatggtgccctctctgatcgattaatgttataactcagtgcgatactcaggtggttagttgctgtcctagagttagtttgtcagcttcccatgccagtagggctgtggcagctaatgctttgaagcatgggggccatcccagcgccatggagtccaactgcctggataagtatgccaccaggcgatgccatgatcccgtgacctgagttaggactcctatagccattccctttcactcatgggcctatagaaagaaaggcttagttagacctggcagtcctaaggctggagccctagttaaggcttctttgatttgtttaaatgccttttcctggtctgcctcccagaggagggacttcttccctgcctcccccacttctaatgtgaccatgggctcctgggggcctagggagaaggaacccggttggtcctagtcctcatattcttaattctctgccagcccgatcaggtcggcatctggctccctcagggtgtggcagcccttggctgggggcctctttgtttcatagcctttgccattctcttcattgtcctctggacattcatttttctagtgtcccttctttttgcactgcacacattgacctccccttagcctcagccatctcttggctcgctgttcaacttggcctcttccatgcccacacccatgtgaacattcgcgtccctttacaatgttaattttcctttttgtgagggctgccgctaacaggttggcctttttcctaagcctctgctctgtttccttttttgcctcttggtcacagttaatgtacacctcggtggccacttctataagctgggtggcattcatgcctgcaaaaccctctagcttttgcagcttctctctgatgtcaccctgggcttgccttacaaatgctgcattcaccatgcactgattttcagcagcctcagggtcaaatggagtgtaaaactaaaatgcctcacagagtctctcataaaactggctagggctcccatcaattcgctggagtacttcagagaccttccttatattgattgccttttttccaccttccctcaatcattgcagctgtgcttcttagtacctttgcaggcgctgaagctgggttgcgtcatttgggtcccagttgggatctgtttctgggaattggccctgagcatatgcctggacattaagggtgccttcaggcacactggcttctagccagcagagagctgcctgggctatcctttgacactccttcgtgttaaacagcgttaggaggagattcctgcaatctggccaggttggattgtgcattaggaagatagactgcattagatctatgaggtcctgggggttctccgtgtaggagggggtatgatgtttccagtttaggagattagtggtagaaaaaggctggtaaataaaagtctgttgccccccttggacctggccctgttcatcataataaataggtccctgtgttttctggaggggcatctgcaaagctctggtgtgggtaaattgaaggtggcctgcttgatcatcttgacttccttcttcacctcctgggacaggggctcagatttgcccctttagggtgtagcctggggcatgataccatctgagttgggctgctcagtggccagccttggtaaaggtgggtagattggtgcatagggaggaggggtttctatctcctccggtggttcctccaaaactggtttctcctgtctttcctgtggctttccctttgtctctgtagcttccagcaaagctgatttttttttggtggcttaggctcagcttgagcaaaaagctgccaggcaagtctgcaaccatgcaggtggagtctgtactatatttaaccatgagtcaatacaagggaactggtctaggtgccctgactgtcctctgaccccagttaccaccttaaatacatagccaattgtttccttatctacatttccttcagctggccatctaacatcaaaagagggccattgtatttcacagagagttctcagcctctgggggtcaacttaattccatagtccccgaataacctttcttaaagttccttaacatacatgctaatcgggtgggttttggtgacttccctcccatttcctccccaatacagcacaacacattcattcttccttttgattcagaccaattaaaccatcccccttgcaggagttttcagacactgcttagctttggagtttgttaatcccctcacaattactaaattgtggggcacctccataagccgtatgtggattgccactagtcccggttggtcccacaattctctcagagcgcacagtctatactaagagagctgtagcccccacatgtcactgtctgcattggttcctcccaaaaccatctctttcacacacagtcacacaccgtcctactcccagttttctctcctaactgacttcgcgagccactcttatgccctagtcacttggggtgtaagtttccctgagtttgcaaaccattcttgcatcctgtgtcagtctactagttacaccttggaaggtgatcaggctccccttccatccttatgggacggttcctgccttgggccccaaaaccttaccgtggtcctgtagtgcactgttcctggaatcatcctgtagccccttagattctgttgtgctgtctgggaggggcactgggttgtgggatagctgatcccttcttcaggtttaagttctcctgatggcacctgaggtcatgggtctctcctggcttggggtctcacacctaaaggcaaagtagacagcaaacctgtcatctccatctcctggctggctcaccaaagtgttgcagaaaacaggaggcaggagaggccagtgggtgaaactagaggattttattaaggtgcacactggctcagtggattcacacacaaaaagctgagccctggacaagtacagggcttgtcttttatatgtgcatggtggccatctagtggcacaaggctcctggtgcaagcaagcaggctcacagaagcagaacaaaggcagttaattaaacagtgacaggttatgctgaccttgcagctgcattgggaggaaaacaggaagttaacaaactaaagctgaccttgcagctgcattgggaggaaaacaggaagttaacaaactaaagcaggccttgcagctggtatacgtcttactcaagctcgtcttgtgaccttgtcatgttgcccagaacagagaaactggagttgttgtgaagtaaccttgagtttcactaaggaaaaattactaaagagacagggaagctgggagaggaggaaaacttgtttttcacatccttgctctttgggagaagaggggctaaggactagttttctctacatcctctacttcagttttatgatggtgttcattattattttatttttaagcaaaattgactcattatagcatttctttttttttttttttttttgcagagtctcagaatgctcttaaactcttagtctctagtgttctgacagccttgacctcctaaaactaagattacaggcatgagccatggtgcctggtcaccatgtacctttttttgtagaactgtgctagtggtgatgaacatcttcaccttttattttggaaattctttattttcatcttctttttaaagggaagtaaatttaaatcaagtattattggttagaaatttttttttattacatcaaaatttgggaagttttcacccttttttatcttcaaataacctctgtattttttttcttcattttcttcttctaagatttcctaaatctagttgatggttatctaataagttgtttgttttgttttgtttttgtttttgtttttgttttttttgagatggagtctcgctctgtttcccaggctggagtgcagtggcacaatctcagctcatggcaaactctgtctcctgggttcatgccattctcttgcctcagcatcctgagtagctgggagtacaggtgcccgccaccacgcccagctatttttttatatttttgtagagactgggtttcaccatgttagccaggatgggcttgatctcctgacctcatgatctgcctgccttggcctcccaaggtatctaataagttttacattccatgttttaactttgttttgcaattatagatttttgtgttatatattttagggtatgccaccacacattcattaattgtgttttgattttttagtatttattataattatgcatgctaatttttaacatcttataatttaaggcagtgtggaagaaagtcaaatatgaatgagctatacgtctttttccaatagaattatctctgtgtttgttttcctgtatacaaaaataaatgttatccttgtattttttttctaacttgtatatttgttgtgtaggtttgttgtgaatggttttctaattctgcgtagatgagtcatcataaaatactctttttttttgagatggactcttgctcttcttgcccaggctggagtgtaatggcgcgatctcagctcactgcaacttctgcctcctgggttgaaatgattctagtgcctcagcctcctatgtagctgagattacaggcatgtgccaacatgcctggctaatatttttgtatttttagtagagacagggtttctccatgttggtcaggctggtcttgaactcccaacctcaggtgatctgcccgcctcagcttcccaatgtactgagattacaggtgtgagccaccatgctcagcccataaaatttttataatttcaacaacctatttatttgtaaatctatatgatttctgtgtgggagaaacacttttggatttgaatataatttaaaactatcataactctgtatctcttttagttattattgtttatttcttgtcaaaaaaaaacaaaatttaccacaaaatatttttaaatatttagtcatatcaattatcttgacattgtcatgcaacatattgctagaatgtttttatcttgcaaagctaaatcttaacacatattaaacaacaagtactaatttttaattttttctttttttcttttttctttttttttttgagctggagtcttactctgctactcaggctggagtgctgtggcatgattcacctcactgcaacttccacctcccgggttcaagcaattctcacgcctcagcctcctgaatagctggaattacaggtgcccatcaccatgcctggctaatttttgcatttttagtaaagatgcagtttcaccatgttggccagcgtggtttcaaactcctgaccttaggtaatctatctgcctcagcctttcaaagtgctgggattacaggtatgggccaccatgcctggccacaattttttctgttttatagcgttttgcaaacaccactctgttttttgtttttaacagtataactacttcatgtatgtcataaaatctgtgtctttttgtgattggctcatttcattttgcataatgccatcaagatttatatttatagttggtagaatatttcctgcttttgaatactgagtatattccagaatatatatatatattttttgagacagtcttgccctgtcacctaggctggagtgcagtggggcgatcttggctcactgcaacctctgcctcctgggttcaagcaattcttttgcctcagcctcccgagtagctgggattacaggcacgtgccaacacgtttggctaatttttgtattttttttttcagtaaggacagggttcaccattgttggtctggttgatctcgaactccttaccttgtgatctgcctgccttggcctcccaaagtgctgggattacaggtgtgaaccaccgtgcctgggaagaatttttatatttcaaattatatctactgaatgatttattgaaagatatttgcattgcttttacctatttgcttacagtaacaatgctgcagcttttccgcgctacctgcagaggggtccatacggcgttgttctggattcccgtcgtaacttaaagggaaactttcacaatgtccggagcccttgatgtcctgcaaatgaaggaggaggatgtccttaagttccttgcagcaggaacccacttaggtggcaccaatcttgacttccagatggaacactacatctataaaaggaaaagtgatggcatctatatcataaatctcaagaggacctgggagaagcttctgctggcagctcgtgctattgttgccattgaaaaccctgctgatgtcagtgttatatcctccaggaatactggccagagggctgtgctgaagtttgctgctgccactggagccactccaattgctggccgcttcactcctggaaccttcactaaccagatccaggcagccttctgggagccacggcttcttgtggttactgaccccagggctgaccaccagcctctcacggaggcatcttatgttaacctacctaccattgcgctgtgtaacacagattctcctctgcgctatgtggacattgccatcccatgcaacaacaagggagctcactcagtgggtttgatgtggtggatgctggctcgggaagttctgcgcatgcgtggcaccatttcccgtgaacacccatgggaggtcatgcctgatctgtacttctacagagatcctgaagagattgaaaaagaagagcaggctgctgctgagaaggcagtgaccaaggaggaatttcagggtgaatggactgctccctctcctgagttcactgctactcagcctgaggttgcagactggtctgaaggtgtacaggtgccctctgtgcctattcagcaattccctactgaagactggagcgctcagcctgccacggaagactggtctgcagctcccactgctcaggccactgaatgggtaggagcaaccactgactggtcttaagctgttcttgcataggctcttaagcagcatggaaaaatggttgatggaaaataaacatcagtttctaaaaaaaaaaaaaaaaaaaatgctgcaataattatgagtctataaatgactacttatatgaccatatatgtgaaagtttatatatgtgctgcattctattttattagtctactttttcacctttatactcatatcaaattgtttaatttggtagctttgtaatgtgttttgaatcaggcactttaatgcctgcagcattctttctttctttttttttttttaatattgttgggtagtttgtttttcttttgagtctctgtatacttttgaggttggtgtttctatttcttcaaaaatgcaatgagaaatttgaaaaatattgcattaaatctgtagattgcattgagcaggatggactctgcaatattaagtatttcaacctttgtgtaagagcacactcaagagtgtgttgtttagtttctatatatttgtaaatttttcagttttttttttttgcttttatcgttgtatattctcattccattttggtcatagaatgtagttcatagaaatttacttttaaaaaatttgataagacttcctttttgtcctaagatgtggtctttcaagggaaatgttgtatgagctattgagaagggtgtgtattctgatgttgttgaggagtgttctccataactctgtttggaataattgttttatactgcctttaagtagtctgttcttttattaacattctttcttgttttagttttattacaaaaagtgtggtattaaaatatattgttctaattatattgctttctgtgtgtttcttccattctgtcaatatttgctttatatacttggaaccctaatgtgagacacacacacacacacacacacacacacacacaaatttgtcatagattccctgtgaatgaatctattattttttgatgtccttctttgtttctttggagtttcaatttcaagcacattttataaaatattatactttctgacttaagatgtagcttgtgtgatattattttgactctttctgctcttatttgattaatgtttgcatggaatgtctacttccatcctgccacttacagtcttttttaattattagacttactgttattttattatgcattttatttgattattgcatctttgtgtcttattctctttccatctttgtgtctttttgatgtttgcattgatatgctttcgcttatttatttatttatttgtttgagactgagttttactcttgttgtccatgctggagtgcaatggcattgatcttggctcaccgcaatctccgcctcctgggttcaagcaatttacctgcctcaacctcctgagtagctgagattacaggcaggtgccaccatgcctggctaattttgtatttttagtagatatgaggtttctccatgttggtcaggctagtcttgaactcctgacttcaggtgatccacccgcctcggcctcccaaagtgctggaattacaggcataagccaccatgcccaacctcttttgtgtatttatacaaatatttttgtggtaccttggggactacatataatgtctaaaagatacaacaatacattttaatctggtagaaaaacaggttgcatacaaaaattcttctttattacatcttccctcaaatttgtcattgatgttgctaattatatcttatgttgtatgttcattaactgatgtttataatgatttctattcttttattgttcaaatttcagagaataattaaaaatgttttctgcgtcactaggataatgctaataaattctacaaagtgaatttgcatattttttctagaaaataatgtatttttatataattatgtgtagctttttgaatcatgttattttcagtaaaaggaactgttgttagcaccttttatatgtagggcatatgcagttccaatatacttttttagaatttcattactttggaaggttttttttttttatttggcaggatagattcactgatggtataattctcacttaataggtattttttttaacaactttttcatgactccataacatagttctttttttgagactaaacgtctctctatcccccagccaggctggagcatagtggtatgacttcaactcactgcaacctccacttcccaggttcaagtggttctccagcctcagcctcctgagtagctggtattacaggcatgtgccaccacacccagctaatttttgtcgttttggtagagacagggtttcaccatcttgtccaggctggccttgaactcctgacctcaggtgatccgtccacctctgcctcccaaagtgcctggattacaggcaggagccaccatgcctggcctggcacatcacttttatcttgcagcttcaaagataatctttttgtctttgactagaaattgtggttatatacatgtttgttataaatatctttctgtgatactagtttgttgtacttctttatttttacatcatattttcttttaggatctattagttttttttaaatttttttacctccacaatttttgtttttttgaaatcttaaatatttttgttcttgtcctcatttttctgaatttccatagttgtctctgttcctattttaatcaatgagaactattcaatttattaccaattattaaaagtaatttatacctctgattttttttatgctttctttcagaaaaatttataatatttttgctgggatcatattgccctattttgtatattttatctttgattgtgatttggacattaaaaaaagctacctgtcaaaatctttataatgttgttctgtcctggcatagtctgaaaacaattgttttggctggtgattatgggagtttctcacacatattcttaggatatgtgctgtctgaaattttgtgtttaatttttaattaacagagtttactcttgttattttgtaggagtcagaaatcacttgctacacctgttccttttctgtggtactgctgtcagtctgctgctctaccacttttttttttggtctcagctgactcaaactctcatttcaaaatatgccaccatttctttcagcactttatgtcatgagagactgaaacaagtgtcagaaaaggtccctaaaagtcagaaataacaacgaatgtgccagtattttagctttcttttaaaacagaaaccaagagttaggaatttacttctgaaggtactacgttatagtggaaagcaggaaaagctgtgttgggtgaatttaacacttcctttttttctttgtgctcacctggaacactgcacacacttatttataaattttttacagatgtatttgggtctgtatattttagttacatttatatatctataaatgaattagagcctgtggtattttgcaatgccctcttgtttatgtatttggtataattttaaaggtaagattttaaaactatatccatgtgagtctagtaggtggagtaatttattatttttatttttatttttttaggtatatgccctcattttgcttaagacctctggccagagcagggcatggaagattccttttaaaaagtaatactgagaagacatgaaaaatgtggacatgataatttactgttgagaaatggctgtaaaagtgtggatgagtgtcaggtgcacaaagaaggttataatggacttaacaagtgtttcacaactactcagagcaaagtatttcaatgtggtaaatgtttgaaagtcctttataaatttttaaattcaaacaaaaaataagatatactggaagaaaacctttcaaatgtcaaaaatgtgtcaaatcattttgcatgctttcacacaaaacccaacataaaagcatttatactagagagaagtcctacaaatgtaaaaaatgtggaaaaacctttaattggtcctcaatccttactaataataagaaaattcatactgaacagaaaccttacaaatgtgaagaatgtggcaaagcttttaagcaacactcaacccttactacacataaaataatttgtgctgaagaaaaactttacagatgtgaagaatgtggcaaagcattttgccagccctcaaccctaactagatataagaggatgcacagaagaaagaaactctacaaatgtgaagaatgtggcaaagcgtttacccagttctcaacccttacgaaacataagagaattcatactagagggaaacattacaagtgtgaagaaagtggcaaagcatttatctggtcctcaggccttactgaacataggagagtccatactagacagaaaccctacaaatgtgaagaatgtggcaaagcattaattcaattctcaaccctaactagacataagaggatacacactggagagaaacccaacaaatctatgtggcaaaccttttagccaaaactcaaaccttactatatataagataattcatactgaaaagaaaccctacaaatgtcaagaatgtggcaatgcttttagccagtccccataccttactacacataaggtaattcatactgggagagaccctacaaatgtgaagaaggtggcaaagcatttctatggttcattaccctaactggtcataagaggatgcacactggagagaaaccctacaaatgtgaagaatatgaaaaagcttttagccagtcatcaatccttactcgacataagataattcatactggagagaaaccctacaaatgtgaagaatgtggcaaagctttcagccagtcctcaacccttactacacataagagaattcatactggagagaaaccctacaaatgtgaggaacgtggcaaatcttttaacctgtcttcaagctttactaaacataaggtaattcacagtggagtaaaaccctacaagtgtgaagaatgtggcaaagcctttaggcagtcttcaatttttgctaaccataagagaattcatactggaaagaaaccctacaagtgtgaagaatgtggcaaatcttttaacctgtcttcaagctttactaaacataaggtaattcttactggtttaaaaccctacaaatgggaagaatgtgccaatgccttttcctggtcctcagccctaactaaacataagaaaatttatacttgaaagcaaccctacaaatgggaaaaatttggcaaacctttaatccttacaacttaatgcacataagataacttatattgaagagaaatattacaagtgtgaataatgtgtcaaagcctataaaaagtcctcaattctttacagacataaggttatttatactggagagaaactttgcaaacctgaaagatgtgccaatgcttttgacaacaacttaagcttttctaaacataaagaaaatcatgctgctgagaatcctagaagtgtgaagaatgtgacaaagcctttaaatgattgtcacacttgattgtaggtaaggtaattcatactggagataactatcagtgtgtacaatgtggccaagcttctaactaatgctcacacgttattgcacaggaaagcatttataagcatttatacttgagaacaaatgtgcaaatataaagtaaaaaagccattaatacctgctcacatcttactcaaaatcagatagttcatatgaaataaaagcataaaagtgtaattactgtccaaagatctattagaaaatatgtctttaaagtgcagaagagtatttactttaaaaaagcactacaaatataaatagggttgtaatacctttacttgtatcagaaatcttattgtacacattttgtgctagaggaaaaccctgaggcagttgttaaaattttgtccaacatcagtgagtttatattgaagaaaaccctgcaaatataataaatttggaaaaacattttttcaaaaactacaaattataaaacaccaaagagtttatactaaaatatatttttgcaggtgcagtaaagatgaaagatatttaatccaaaattgtctatgtaaatatcagaataatccacagtagaaatatctagggccactcaatgtttagacactactgtaaatcagagtgctgcgtataaaaaataatacaaaactatagatagcataaacattatttgtatataactttaaaagaagtagaatattttttggagagttataattacattcaaattatactttttatgaacatacaggtttttttcgaagtgaataataatgaagttaaactcttaaattacttcatgctcttccatattcctggtttattcaaatgtgaaagcatgtgactaattgttgctggacaaaatatatgagagattcttgtttattaggtaagcattacttatgaccttttctatggaaaggtaaggacattaaaatgtaagatgcataatgaaaatttaagtagagaggctctttgtggttaacttataatattttgtgatacatgaggtaggtgttcagagtaatactcttctacattattatgaaagaaaaatattcttaattttagttaaaattaggttagtaatgttattttattaattgcacttttatggaatactatacagcatatttttaaattataaattatttgtgaaattaacttttcaattccacatttttaacatgttaaatactatcatgaatccattgaaatgttattgtgccactaactttaacctattccatcttacacaagggtgtaggtaacaatacattatttggtaagataatggactgacatcactagtaatctttattgccagtaactttaaatggccaataagttaaaaaatattgttcctataggttatatttttattcttattttcacatttaaatgtatttttcttaatttctgtggatatatgtttatatgtttatgccatatatggcatattttaatacaggaatacaaaatatgataatcacattagaggaaatgagatgtccattacctctagcatttattctttgtattacaagcaattcaattctacagtttaagttatttttaatgtacaattaaattgttattgactacagggtcatttttatcatcataatacaaattatatacaaacatgtaaaatccatacatttctgagtccttaataaatatttttataaattttaatatatttttctttgaacatgtggcctttgcctgcaagcacatatggactgttagtattgatttacatagagttaaatattcacatctattagtctaaagataaactttaggtctaaataaattatggagtaagtctgtttgtgtgagtataaatttgaaactatttttagcagaaaaaaatattagaacaaaataaatcattttaatcaggggcctaattcactagaaaacaaaaattctcaaaaatggtgaaagcaaatctatgctctctgctttgtattgaatttattaccgtgcaatcttttggctcagggttcagaatctccccatgcaaattctctgttttaatttgactggtactcatgctagtcccgtaatattctttttttgtttgtttaatagtttttttttttgttgttgttgttcttgtttttttcttttgagatagagtcttgctctgtctcccaggctggagtgcaatggtgagatcttggctcactgtagcctctgcctctcaggttcaagcagttctgcctcagcctcccaagtagctgggattacatgtgcccgccaccatgcccagctaatttttgtattttcactacagacagtgtttcaccaggttggtcacgctggtctcaaactcctgacctcaggtgatccatccacctcagcctcccagagtgctgggattacaggtgtgagccactgcacccagcctgtgtaatagtttatgaagtattcattatgtgaactggtctgtaattataagaatatatatttttttaattttattgttccataagttattggggtataggtggtatttggttagataagtaagttctttagtggtgatttgtgagatcttggtgcacccatcacccaagcagtatacactgcatcatatatgttgtcttttattcctctcccttcccactcttctccccatgtccccaaagtccattgtattattcttatacctttccattctcatagcttacctcccacatatcagtgagaacatatgatggttggttttccattcctgagttacttcacgtagaataatagtctccagtctcatccaggttattgcaaatgcttttaattaattacttgttatggctgagtagtattccaacacacacacacacagacacacacacacacacaccccacagtttctttatccactcgttgattgatgggcattttggttggttccagaattttgcaattgtgaattgtgctgctagaaatatgcatgtgcaagtatctctttcaaataatgacttatttttctctgggtagatacccagtagtgggattgctggatcaaatgataattctgcttttagttctttaaggaatttccacagtttcctatagtgactgtactggttgacattcccaccggcagtgtggaagtgttctttgattgctgcatccatgccaacatctacagttttttgatcttttgattacggccattcctgcaggaatagagtggtatcgcattgtggtttgatttgcatttccctgatcattagtgatgttgagcattttttttaatatgtttgttggccatttgtgtatcttttgagatttttctattttttgatttttttcttactgatttgagttcattacagattctgtatattagtcctttgtcagatgtatagattgtaaagattttctcccactctctgagttatctgtctattctgctgactgttccttttgccatgccaaagctttttagtttaattaggtcccagctgtttatctttgtttttactgcatttgcttttaggtttttggtcatgaaattttggccaaccaatgcctagaagagttttttcaatgttagcttccagagtttttatagtttcaggtcttaggtttaagtccttaatccatcttgtgttgatttttttttaataagatgggacatgaggatccagttttattctcccacatgtggctagcctattatcccagtaccgtttgttgaaaagggtgtcctttccccactttatgtttttgtttgctttgttgaaaatcagttggctgtaagtatttgggtttatttctgggttctctgttccattggtgtatgtgcctatttttataccaggaccatgctgttttggtgacttatagtatactttgaaatcaggtagtgtgtttcctccagatttgttcttttttcttagtcttactttggctatatgggcttcgtatgattttttgaattgttttttctaactctgtgaagaatgttggtggtattttgatggggattgtgttgaatttattgattgcttttggcagtatggtcattatcacaatattgattctacccatccatgagcatgggatgtgtttccatttgtttgtgtcgtctatgatttctttcagcggtgttttgtagttttccttcttttggctccttcattaggtatatttcctaagtattttatttttttcagctattgtaaaaggggatgagttcttgatttaattctccatttggttgctgttggtgaatagaagagctactgatttgtgtacattaatcttgtatccagaaacttttctgaattttgtcagttctaggagctttctggaggagtccttagggttttcaaggtaaataatcatgtcatcagcaaacagggacagtttgacttcctgtttactgatttggatgcctttatttcttgtcttattgctctggctatgatttccaggactatgttgaagaggagtggtgagagtgggcacccttgtcttgttcccattttcagagggaacgcttttaacttttccccattcactattatgttggttgtgggtttgccatagatagcttttattacattaagctgtgtcctttttatgccaactttgctgagagttttaattataaagcgatgttggattttgttgaatgttttttctgcatctattgagatgatcatgtgatttttgttttcaattctgtttatgtggtgtatcatttgttgacctgtgtgtgttaaaccatccctgcatctgtggtgtgaaacccacttgatcatggattatctttttgacatgttggatttggtaagctaatattttgttaaggattttagcattaatgtttatcaaggatatgggtctgtagttttctttttggttgtgtcttttcctggttttggtattagagtgatgctggcttcatagaatgaattagggagagttctttatctagtgtcaaaaggtttggtaccacttctttgaatttctggtagaattttgctgtgaatctgttggatttttttttgttggtggtaagttttaaattaccattttaatctcactgcttgttattgatctgttcagggtatctaattcttcctgttttaagctagtagggttgtatttttccaggaatttatccatctcttctacattttccaggaatttatccatctcttctatgttttctagcttatgtgtatgtgtgtaaaggtgttcttaggagccttgaatgattttttgtatttcagtggtgtcagttataatattctttagtttcatttctcagtgaggttatttggattttctctcttcttgatcaattttgctaatgatgtatcaattttatttatcttttctgagaagcagctctttgtttcatttaccttctgtattttttgtttatttgtttgtttcaatttcatttagttctgctctgatcttgattatttccttttttttctgctgggtttgggtttcatttgttcttgtttctctagttccttgtctgtctgtgctctttcaaactttttgatgtaggcatttagggctatgaactttcctgttagtaccaccttagctgtatcccagaggttttgataggttgtatcattattgtcattaagttgaagaattttttaatttccatattgattttgtttttaacgcaatgctcattaaggagcagattatttaatttccatgtatttgcatggttttgaaggttcctttgggagttgatttccagttttattccactgtgatctgagagagttcttggtataatgtcaattttcttaaatttattgaggcgcgttatgattgtctctgctgattcattcagggtgtcagggacgtgggggaaagctggcagtcacaggcctcactcagctccagtggaaaccaaaaggctggtctcacacccactgcacccctcacaacagccccaaatctgtttccatgtggagggcaagttgggtttgaaaattaccccaggctttctgtttctcagtgtggtaaaataaaaaggctttagttcttccccacctgtgaagtgttcaagccagagtcacgccttccctgagttcttgccaggaggcttcttgccccattcaaattgttatgaagttcagctagggaaatccttctccccttggagttttaccccttgcttctctgtcctcctccctctcccatggattcctgtggtgccaggcaggaatgggctccttggggattcagcgagctcccagggcctccctgttgcctcctgaacccctgtatttcactcagcttggctctctaacttgactcacctccaggtagtaaggagcttctcccacaaacagactttcagtttctccagtggggtcgttgtgttcaggagaagagagtctccctttcccacttctgcagtggtggcactcactgtatttggggtgtctgtcaggtcctgcaggagcagtctgcttccttcagagggttgtcctgatgcctttaaggacatattctgaagataaaggtggtgattttttcagatactctctcctgagaaggaatcagagaagagagaaaaaatggttgattctcaaatgaatgtgtcccaggtcaaaactgtgtccacattttcttctagaaggtcatgtatttacagttgcaatcattttcatttctacttctgatgcttttgcctaacaagattatttgaagtaccttttttcttctcatgacagtgaaatgacctcattaaaataattctcccctatgtttcagagccttatctttattctctccatccaggcttcttacatatcacaaatagtaccttgaatttataccgtgaaatattgaaagtattccctttgttgacagatcagcctgagcaggtgaagatataaaacattcttattggggatggtgctgggtcctcagatatcagtgagggagaaaactgcaccatttaggttctatctgaatgctccatcagctctatgaataacacaatttttaaatgcacacttaaaaaagatggaattaatggcctggaataatttagaaagatatgtaaaggaatgaattcaaagaaatgtgccttctagaatgcttaaagagagagtatttagatacactattagaaattacaaaacatgcgctgggcacggtggctgacacctgtaatcccagcactctgggaagctgaggtgggcagatcacctgaggtcaggagtttgagaccagcctgaccaacacggtgaaaccccatctctactaaaatacaaaaaaaaaattagccggacactgtggcacgtgcctgtaatcccagctacttgggaggctgaggcaggagaatctcttgaacacaggaggcagaggttgcggtgagccaagattgcaccattgcactccagcctgggtgaaaacaacaaaactccgtctcaaaaaaaaaaaaaaaaaaaaaaaagacaaaacatggacatcgtatgtgccttgaactttacataaaacatgttttttatgattagattcagattatgatttatgtttttttggccagtaatctcacagaagtcatgttgcatcctccaatatgtatcagcacctgataccaatctgtctcattaattttatttacttggttaacgtgttttctcaaggatttcttccctataatgtttcttttaaaaaactgtattatttgggaggccgaggcaggcagatcacgaggtcaggagatcgagaccatcctggctaacatggtgaaaccccgtctctactaaaattacaaaaaatcagctgggcgtggtggtgggcacctgtagtcccagctactcgggaggctaaggcaggagaatggcgtgaacctgaggggcggagcttgcagtgagccaagatcacgccactgcactccagcctgggcgacagagccagactccgtctcaaaaaacaaaacaaaaacctgtattattaacaggtactttggagaaactttctgactaatgtgcataaacaatcacatttaatctgaaagctcccctgtcacgccaagtgtcaggttccaacccaatcggaggtctgacaggagtgggtgggtgatttgtgggttactggaaaaacactcatggaattgtgggcagttttgagatggctttattctctaggcataagcctgggcatgagccctgtgtacagggtgagcagcttactctctctcctcctcctgttcacctgtctgtgtactccttacactcagtagcggctgagagctaagtatgagcttatacaaccaggttacatattagcagagatgagcacttgtactccaaacttactgagtcaggctgaaccagatgtttaccacggcctattcttgaccactgcacatccatttatcttacaccctttttctgaatagtttctctttgtttatactttgctttggaaaatgaaggctgtcatttttgtttactggtcatatacactgggataaaacccaggttctatcagttactagatgttttacaaagtattttccttaagctagaatgattgacatcactggtgagtttgtttgcaatatagtaactcaggtctcatcccacatcccttgaattagaatacgtattttaacaaaatctccaggttattgatgtatgcattaaaatttgagaggtatctcctaagttactgtgacttctccatgtgagaactgtacacagcttactctgtataatctaaatatggcattcagaactgtatatacttgtgtttatgccataagttctatgccgtgttattcagaaaactatagtaattacactggttttttggatcttattttatcctctttgttcagaatgaaggaatgcattagagaatctttctctgttaagcaatattttattggataattccagtctcttatgtaaaacagagccaactctcttaactctgaaacacctagagtaaaattaacaattctgcccatgaccacttgctaaatatgtgtgttttttttttttttaggaaatgttaactttcaaggctgtggccatagaattttctcaggaggagtgggaatgtctgaatcctgctcagtgaaatttgtatagagatgtaatgttagagaacaacagaaacctggtctctcagaataaattttcaccagatttcctaatataccctaaggcttctattttctccctttgtagaatgattttgggagtttttgctccacataaattatttttagatcaacccttttaaggaaaacttgacggtttattgaaatagaaaagaaaatcttcaagatgttttatcttaacaggaaccatccccttttttttgaggtaatctgtatccttcactctagattaatgataattctagaaattcagtggcattaaatattattgcccaaataataaaatccaatatccagcaccaattttaaattcaatagtattggatagtagagctaaggacccagaaatgtaaaatatgttctaagtattctaaaggttctgtcagaaaacagtattttggaattaaatttctaaaatctttcataatattctctcctctgtactaaacatggtactaggatggtaactggagaatcccaacaaatcatgttaacttttttctaacaaatcaggctgtggtgtctctgtacctgatctgatctcctgccttgagcaaataaaagaaccctggtatgtaaagagacatgagacagtggtcaaatactctggcacgtaagcatgaatgaagcagataacacagacaagaggtacaaaggtcaaaaagaattccagaccttaaaatgtggtatgggatgctctgcttcaatggaaaggttcctaaaaagccattttgtttttttccctagttcttatataggagcatcttttgtcccataccattaaattctttatggactctacttcctatttagtgattttcctttgagggtaccatgagagctaaagtcctctttatggcttataaggtactgcatgatatacctgctcttccattgctttggggcaatatgagaatatctctaactatttttgagaaactgcatgttagatcatttgttaggttttcttttcccatcatatctgaaatgtgtgagagcagtggtgatattaagatttgtttcagaaatctcaggaacatcaatgacatgttacttgttatttatctatattgtcttgtcttttcttttttcttctgttttcttttttttgagatgaagtttcactcttgttgccgaggctggagtgcaatggcatggtctcagcttaccgcaatctttgcctcctgggttcaagcgattctcccgccgcagccttctgagtagctgggattacaggcatgcaccaccacacctggctaattttgtatttttagtagagatggggtttcttcatgttgtccagcctggtctccaactcctgacctcaggtgatctgcctgccttggcctcccaaagtgctggaattacaggtgtgaaccaccgcacctggcctctattttttctttttgatattaggaatcttaacagatttgaagtgatagctcatcgttgtttttgtttgtaattgcctgtttgtgggggctatttagcactttttaaatatatctattggtcatttgtatataattcattggcaaaatatttcttcagtgttttgactatttttcagttggtttatcattgttattatacttgtctttgctttgaattttctatatattttgaattttaaacttttcttgtatgtatggtttgctattgtgagcatgctgtgataaacatgcaagtataggtatcattttcacataataaactatttttttgggtagatacccaatggtgaaatttctgaatcaaattgtagttctatttttagttatctgagattaagcatactcatgttggctatttgtatgtctttattgaaaagtgcttagtaatgttattggtccatttttcaatgggatttcttactatgcttttagtttgagttatttgtaaattccaaatataagtttcatgttgtcacatagtttgcaaatatgttcttttattctttaggttgcctatttaccctgttattttatttgctgtgcaaaaactttttagtttgaatctaatttgtccatttttttataatataataataatataataacaattttctttgttgtgttcatggctagttttggtagcagggtggtactgacctgagagtgacttaggaagaattttattatcctcaattttttggaagagtttcaggaggatttggtagaatttttatacatttggtagaatttggctgtgcatttatctagttctgagcttttctttttcaagacttttttttattactgactcaatcatgctactcattattggtttgttcaggtactcagtttcttcctggctctatcttgggaggttgtatgtttccatgaatttattcattctttgtaggttttcaggtttatgagtgtctagttgtttataatcattgctagtgattttttgtattgctgttgtatccattgtaatgtctattctttcatttctgattttgtttatttagatttctattctgtttgtggttaatctagctggcaatttataaattttgtctttttgaaaaagcaactttttattctattggtcattcttatagtttttggtttttatttcatttggttctgttctgatttatgttttttttttcttcttctaacttggaattttgtttgttactaattttctagttccttgaaatatgatgtcaggtccttaacatgtaagctttctacttttttgatgcagacatttaggctataaactgccctcttagtactatatttgatgtatctcacaggttttattatattgtgtttctatttccatcttttttccccacacatttttaattttcatcttaattttctttttgagatgagttttactctgtcacctgggctggagtgcagtggaacaatcttggctcactgcaacctctgccttccatgctcaagtgatctttttatctcagcctcctgagtagctagtatcataggtgcgcagcaccacacctagctatttttaaattttttttgtagcaatgcggtttttgcatgttgctcaggccgtctcaaactgctgacctcaggcgatccacctgcctcagcctcacaaagtgctgggattacaggtgtgagccaccacctctggctggccatcctaattacttcatttacagtgactgtttgggatcatgttgttttaattgtttgtaaatttatagtttctgaaatttctcttgatatcaattcataattttattctactatggtctaagtaggtagttgatataattttgatttttgggagtactttgttgatttgccagctttcctatctcaatggtctctctaatgctgtgagtagaatgctgaatttctccactattattgtgttacctatagagatattgtgttacctaaagagatgtgtccatctctttctataggtttaataatatttctttttaaagtctgttttatttgatataagacagatactgctgtctgtttttggtttctgtttgtgttaatatctaccccctttacttttagtttatatgtatcttacaagtaaggtgagattcttgtaggcaacacacagttggatcattttttcttattcatttcataaatctatacatttcaatgaaggttttaattgatttatattcaagattatattaatattaaggctttgttactgtcataatgttaattattgccttgttttattttttctttttatctatttatatttgtggtttaataaaattatgtcctattgtgatttatttatttctctctttgttttataaggcctgttttatacttttatatgttttaatgatggtgaatatcaatcttttgtttttatattggaaatccctggaacatcttttgtaggcccagtctattggtagttagtttccccagcctttatttgtcaggataagactttatttcttcttcacttgtgaaggttaatctagcttgatgtaaaatttttggctggcatttttctttcaacactctaaaagtaccatcctgttctcttctggccagtaaagtttctgctgagaagtctgcttttagtctgatgtggttctatttataaatgactagatgcttttctttggctgattttagaattacttctttcactttgagtttagatactatgattattatgtgccatattgaggtctgttttgcattgtattctggtggtgattgctgagcttcctgtatatgtatgtctaattctattgctagagttgggaagttttcatcaattattttcttaaataggttttctaaactttttgatgttttttattcctcagaaactgataatttttgtttagtcactttatgtagttgcaaatatctccaaatctttgttcattctttttcatttctctccttatttttgtctcagtaaattattttaaaagacctgtttaaaggtctgaaaattctttttatgcctgtttcagtctattattgaatttttgaatgtattttctttttccttcattaaatctttaagttctacaatttttgtttctttttttttttctttaaggatgtctatctccttggcacatttcttactcatactctaaatttatttatttatttttatattggttttcagatttctcttgcatctctttgtattggggaaacccacccccaatatttcaacataggttctttctgttttccataaatgtcagccagtctgagaaataaagagaaagagtacaaagagaggaattttacagctgggctgccgggggtgacatcacatatcggtaggaccatgatgcccacctgagccacaaaaccagcaggtttttattaaggatttcaaaaggggagggggtgtaagaacagggagtaggtcacaaagatcacgtgcttcaaagggcaatatcagaaactcctgataagagcctatgttcagtggtgcacgtattgtcttgataaacatcttaacagaaaacagggtttgagagcagataactggtctgaccaaaaatttaccaggctggagtttcccaatcctagtaagcctgagggtactgcaggagaccagggcgtatctcagtacttatctcaaacacataggacagaaattcccagagcggccatttatagacctccccccaggaatgcaattcttttcccagagtattaatgtcaatattccttgctaagagaagaatttagggacatcttccctacttgcacatccatttataggctctctgcaagaagaaaaatgtggctctttttgcctgaccccgcaggcagtcagaccttatggttgtcttcccttgttccctaaaatcgctgctattctgttctttttcaaggtgcactgatttcgtattgttcaaacacgcatgttttacaatcaatttgtacagttaacacaattatcacaaggttctgaggtgacgtacatcctcagcttatgaagataacaggattaagagattaaagtaagataggcataagaaattataagagtattatttgggaagtgataaatatccatgaaatcttcacaatttatgttcctctgccgtggctccagccggtccctccgtttggggtccctgacttcccacaacatctctccctttctttttatataaacgtgccatggcgatgaaggcttgttcattctctcaatttttacacatgattctttgactggtccagcacactaaaaacaagccgattaaacagataatcataataccaaacattactacaatggagcccctggtagacttaatccaagtcatggggtttagtccagaaagactttctgccacctgatctaatgtataactccaggcacaatgtataaaccagcttgagagacttcaaaaatttgtttctttaatttagttatgtccaaggataaattatcttccctactgagaaggtgtcctttgaccatttcccatgaatgatcagtcttgttgtaggaatatggtgtgatacagaaatcagaagtattccaattgtactgcatttgcatgtgatgatcgagactcattagctgatccccaagccaaataacagactgtcttaaatcattcatttggtgaactaatttttgattgatgccttgttgagaattccacatttgggtggaattggcttgccaatcattgacaaaatgagccatttgaatagattggtgtaatgccactccagcagtggtgaccagtgcagtgactgtaattacacccatgatcacagcaactaaagtgaaaacaaatctcttagctcttttgagaattcattgtaacattcattaattaaatatactgagggggaagattcccaaggtctgggtaaagttaccagtatccagattccttcttgagctcgaaccaacatttcacttttcctggagtcaaaatgggagttaatacaagtgtataaatgacaattaatacattgggcagtttgtccaaattttgatatttcccactaacagcatgtaaggaggcttaacacaactctgtataggaatagtcagattggaggtaaacaaagcagaatgcttgaatctaccttgatactgagggaggggagcagcagtggcaatgcccgatgttctccaccataatgaagcaatctgaggtgcccagggatgccaaagaggtagaggggcatacctggattgagaagaattataatgccaattagggtcccataaaggaagattggcatcaaaaagaggaaaagggtttaaaggggatttatcatggggttcagaatcatggatgcgaggggcagcagtggtgacaacagacagaaaagtttccgctttccatactcacagcccggacatggcaatagccaatttccaaagttctgggtgttctgggcacagaatggggaatatcatacgaggcctcaggtgggtaatgcccttatcttcccatttcaagggaaagaatgagctgaacctcctatccaaagtagaatgatgatcctcatccttccaataagaaataaaataagtagcctccaggcattccctcctgccagcggagcaattgttttttaaatagccctttggtgcccagtctattactaaaccatatgagtcattttttttaatactactgcatgtcagttaacacaatcttcccaaattaaagtttcagatgggccctcaacatttttaggacatagttttcctacaggtttatattgaaagtatggggtatctcctattgctccccttttcatttgtcttaaaggagaaagggagaggccagagaccaaatgtcccggttctcttgtagttaatctctccggaagataagcagcccagacttgagtttgtagatggatacaaccaggtgcatgtctgaggcacagaggagggtatttataacccctagtaacattaaatgcagtgccgccttctcctggttgagtggggcaatggtcatctctagctccaggcatccacacactattgttagtatagatttctgcaggagcatccatccagatgagaggtcaaataagtggaggaaaaggcacataagcctaataagaataagtatgtgtagcaggtaagtcagtatgaggggaaattggtgagacagaaagtataaggaggagaaatattaaataaaacctattgtaagcaagatccagtgctgaaggaggaagagaagaacagagggatgttatttttaaggctaatagaaatggtgagattttttggtttaggagaagtgggattagttagaggggtctccattgccattagggaggattgaaccagacccattttgatttgtgtgccagtttctaaggaggtggcacagatctcaccaggtatgagggtggtctctgacacagacgtcttttctctgtggtgttcattgtcagtattcacacgaagtttaagtctcctagtgggcacccagacaggggattgatgatctcctggtgaaacacaagcataccctcttccccacgttataatcgctccaggttcccaggtattggtctgggaatttttccataacactggcttgccttcatttagggagaattttttttgcctgtataatggctttcagctgcagtcagagtattgtctttaggaacattcagaaagtttgaagtaaacaatgctaaatgtaattgggaatggggagtggttaaattattcttttgttgtttagactgtttggacaattgagtttttaaggtgtgattggcccgttccacaacagcctgtccctgaggattgtaagggattctggtaatatgggaaattccccattgttgcataaataaatcaaaagccttacatatccaggggcattgtctgtttttatctgatatggaagccccataactgcaaagcaagaatacttcttttaacatgggccttgccttctcctgtttggcaagtagcccaaataaagcctgaaaaggtgtctacagaaacatgtacatatgaaaatcttgcaaaggagctaatgtgagtcacatccatttgccataaatctttaggagttaggccctctgggattaataccaggttcctgatttggaagtataaaaacttggcactgagagcagcagtggacagtaagcttagcctctttccaggtgagagcaaatttatcttttaatccagcagcattgacatgagtgagattggaacttctgagcttcttgggttgcaaaagagaccaaaagtctaccttttggttaccagcagccatgggtcctggtaaagtggtatgagatctaatatgtgaaatatagaaagggtgtctacattggtgaaccacctgttgtaaccttgaagataagccaattcagaattatcaatatgtttaatagtagcagtttctatatttttagtggcatgcataacataagcagaatcagagacaatatttaaaggtttggggaaaccctgtaaggcagtaattacagcaattaactctgccttttgagcagttgtataaggggtagaaataagcttgtctgtaggacccacataaccagcatttccgttactggagccatcagtgaacgctgtaacggcctcaggaatgggctgatctttggtcagtcgaaggaccacccaataagtcatttttataaaatcaaacaatttgttttttggaaaatgattgtcaataacgctgataaaatcagccaagtgaattttccacagtatggaatgttgagaagcggcctgaactttgagccgatttaaatgaaccacaattaaatttggatcaaatccggaaatttgaactattctacaccgagcttgtccaattagggtggctattttagaatgaggaagaaaacaccactctactaaatcattatgttgaactattagcccagtaggggagtggaatgaagcgaaaactagaagctgaaaaggctgagacagctgtaccctagacaactgggcagtttggattcttctatgaattgcagttccaatgaagcctcaggggtcaaagttctgggactgtggagatgggaatcttcatgcagcatagaaaacaagttagcacatatgttggaatgcctaaagtaggtcttaaataattaatgttacctgctgagaccagctcggttggggagaccctaacccagcggcgctagaggaattaaagacacacacacacacacacacaaatatagagctgtgaagtgggaaatcaggggtctcacagccttcagagctgacagccctggacagagatttacctacgtatttactaacagcaaaccagtcattaacattgtttctatagatgttaaactaactaaaagtatcccttaaggaaaacgaaaggatgggccaaattaattgcagcaggaagatgcccttaagacacagatcactcatgtttttgtttgcggcttaagaatgcctttgagcgattttccgcctgggtgggccaggtgttccttgccctcattcccataaacccacatcctttcagcttgggcgttagggccattatggacatgttatattgctgcagagattttgtttatggccagtcttggggccagtttatggccagattttggggggcttgctcccaatagttacccaaaagtttttggaaatcacttaaggttttcaaagaatctctcctaatctgaacattttgaggttgaatacattctttatcaactgccattcctaaatatggaacaggaggtgtctgttgaattttatcctgagcaatgtgtaatccagcttctgtaactcagcggctcaaaaattgataacagtcaattctttgtcagtggggtcagcaattaatatcaatataatgaagaatataggcctggggaaattgagctccaactggtgaaagcatctgtccaatataaagctggcagatggtagggctattcagcattccctgaggaagtactttccattgataatgaactgcaggctcctgattattgatagatggttaaggcaaatttttcacaatacgatttatgtaaagcagtatgaaagaaacagtctttaagatcaataactatgagaggccaattcttaggtattaaagcaggggcaggcatgacaggttggatggctcccataggtttaattacaacattaatggcccttaaatcagttaccatccgccacttgcctgatttcttttttactagaaacacatgagaattccaggggggaaagaagattccacatgtccaagttgtaactattcagaaaccaattgagttaaagcctccagtttttctttagagagcagccactgatcaaacaggtgtttccaatttccattataaaggcataggattaggaggcatggcattggctgccattaaaagggataacgtaaaccatccctgtcttcttttacagtaacttgaagaggtttagtaattccttcatgttttgggctggtaccgagtctgggaacaaaccccatgtttttcattatatgttgggtgggagcactataagagttatgtggaatattaatttcagtcccccattgtgccagcaaatctctaccccaaagattaatggggattggcatgatataaggctgaattgtacccttttgaccatcagggccagtgcaaggcaagataaatgttctctggggaatttcatcagcttttccaacacctactagtcccatgttagtgggatgtttaagccaggaggaaggccttaaattagaggaaataatagaaacatcaatcccagtatctactaggccatcaaacttttttccttgaatgtgtttggtgcaggtggaccattgtttagaaattacattaatccaataagcggctttttcactgctggagcccatcccagggccccgtgtcttatctcctttgtttaaaacaatattaggtagtaaaagtaattgagcaactgactcactgactggaatggaaacaggaaccttggcagacaccataagtttaatctcattacaggaatcagaattaatgagactagtatgaacagtgattcctttagcagaggtggatgccctacctaacaccaggcccactgaaccttgaggtaaagggccagtgacccccgtggggacaattacaggcaaagaattaggtagtaaatttagaggaatggtactacagagatctactgctccacccccctactgtgaaggtggacaagcattgtactgagacagaagaggctgggacccacctgggttggctgtaggtaaatttgtttgtgctgggggctgcattgggactgcttgaagtgggaacacattggtctgagtctgaggtgttccatttgatattggggcctgggactggccctgctttctgtttccctggttctgtggcaagggatttccatctatatcagacttagaatggcaagtacttgcccagtgtttacctttatggcaatgtgggcaaacagtagcagcagcatttggctgtgtttattgagccagcttggctgcttttaagtttttaacaatgcaatttttttgagtatgaccaagttgactgcaattatagcaggctccaagaaaagaatcagttgagccagtttgattgccatccttcgtggcccatgcccacagaatagctttgtgggtctctgatctaatgccttcacaagctttaatatatgcaggcaacaccttgtgatcaggtaaattttgtcgttggatggaacgaatggccattttacactcatggttcgcattctcaaaagccaacatatgaaggagaataccttgagcgtgctcatcagagacagatttttgaacagcatcttgtaatttaaccaaaaaatcaggatataattcattgtgactctatttaacagtagtaaaagaaacaggagcttggcctggggcacgtaatttatcccaagctctcatacacaactttgttacttgttccatggtgaaagcatcaaaacttgattgaacagtagtatcagattaattatcagagcctgtgaactgagcttgagtaattagaatgccatcagcatgatttagctgagcctgcagacgggccttctctgaccacaaggtatgcaattgtaaatgctgagatggagttagaacagtttttgccaaaatgtcccagtctaaaggaagcagaatgacctcagtacaaagagtctgtaataccattttagcatatggagaagtaggaccatactgagtacaagcatccttgaattcttttaaaaacgtaagattgagtggcacatactgatgcacttgtatccgagcatcaggaggttccagcacgaccagataagcccacacctctaatccacttgtttgtttgttttggcataataagcgttgggtggaagtttcaagagcaggaacatgagacagagtcagcatagaaatgacaggaaaagcatgtgtagataagggaaactgaggttgaggaagtcagactggtatgagagtgtgagaaaggggcatgggggagcagaagaggcagaagcatactggtgattattggcgtccatgcatgaagaagggtacagagaagcaggttgaatggatggcaaagtgactggatgagggaccaaaatgacaggagggtgaggagctgcagtagatgggggatggtctgcagaagtacaggtgaattgtagtttggtcccagagccattaggtggctccggaggcaaagaccgcaaaggtttggagagggaagagttagcatagatatggtcctgggctgtctgtgtcagggccgtgagagccacaagtattggttcttcatgaaaagaaataagatcatctgggggtgacattaagccaaagtcaccagagttagatattgaatcctcaacatcatcaggtgggggaggagtaggtgaagggagacgctgagcagataacaaaggccgaacagaagaggaaagctgaggaagaggtagagagagggttgccagattcagaaaattgtggtaactgcagggggttatgggattggtatgtcattaggatggcacttacaaggccaaatcaccccaaacggtgacaggaacataatttcctgtcgggaccagttcctggaatcttacaccaacacgatcccatagttccacatctaacgttcccttttcaggaaagcaaggacagtgttcttccaccaccctgaatagggtgaccatattttccatggtcactcaaactcctccctgttttaacaggagtttaatatagtagagataagcataatgtttagactctgtgtgacccatacttaccccagacaatacacagacaactcaccaatcatcagggagccgaacaagtgtttctgtggtctggaccaataaacatttctccacacctaccaaagggaatcgggttcccacatgcacttaggataaaaccatgttggcatgccagatattgggggaacttgcccccagtatttcaacataggttctttctattttccataattgtcggccggtctgagaaataaagagtacaaaggtaggaattttacagctgggccgctgggggtgacatcacatatcggtaggaccatgatgcccacctgagccacaaaaccagcaggtttttattaaggatttcaaaaggggagggggtgtaagaacagggagtaggtcacaaagatcacgtgcttcaaagggcaatatcagaaactcctgataagggtctatgttcagcggtgcacgtattgtcttgttaaacatcttaacagaaaacaaggtttgagagcagagaactggtctgaccaaaaatttaccaggctggagtttcccaatcctagtaagcctgagggtactgcaggagaccagggcttatctcagtccttatctcaatcgcatagaacagacattcccagaatggccgtttatagacctccccccaggaatgaaattcttttcctagagtattaatatcaatattccttgctaggaaaagaatttagcgatatctgcactgatttcatattgttcaaacacacgttttacaatcaatttgtacagttaacacagttatcacagggtcctgaggtgacgtacaccttcagcttatgaagataacatgattaagagattaaagtaagacaggcataagaaattataagagtattatttgggaagtggtaaatatccatgaaatcttcacaatttatgttcctctaccgtggctccagccggtccctccatttggggtccctgacttcccgcaacatctttgagcttctttaaaatctatattttgaagtctttttaaagtcttttttttttttttttttttttgagatggagttttgctctcattgcccaggctagagtgcagtggttcaatcttggctcactgcaacctccaccttccaatttgaagagattctcctgcctcagcctcccaagtagttgggattacaggtgcccaccaccacacctagctaattttttttttgtattttttagtagagacagggtttcaccatattggtcaggctggtctcgaactgctgacctcatgatccacccaccttggcctcccaaagtgctgggattgcaggagtgagccactgcacctggcccttttttaaagtcttataaagtcatttcaataatttttttttcttagagtactgaagaattatggaatttctttaaaagtggaataaaccttgcttatctgtgtttcctgtgtatttctgcgtctttatactgatttctgcacatctggagagacaattgcttcattttattttagaatttacattcactggagaaagcttttttttaaattgaagttactatcatgatgtttattgcatagaatcatttggctttactttggggtttgtgcatgggaaagactctgtataagtttcttgagtataagcaaatatatatatatataaacatgttttactggtttaggaatcatgttttctcttaggttgatttttaattctaagtctcagaaaacaattattttttctttgttgtgttggtcattgaaagccagcacacctgacctgaaagggtgagaaggtaggtagggtggggggtgggtgatgagaaattacttaatagttttaatgtacattgttagagtgatggataccctaaaagccctgacttcaccactatgcaatctatgcatgtaactagattacacttgtacccaacacatttgtatagataaattgaaaagaacaactagagtttgctgtcttgcttattcatacatacaaatatgttataaatgtttcccatgacattaactgttgtagatacaggagttagaaattatttaggcagatagtgagtgcaaggaagtccttggtaaagtttcccttctaataaaaagcaacacacaaattatttcttttttgacaaagagcagcctgtaaaatcgagctgcaaacatagataaccaaggtggaagcttgcatgaataaatgccagcagctgtgccaataggaaaggagctacatgtggactgcgcatgttcaaaatggtagctccatcttcccttgtctttgtaaaccagatgtagagtaagaagcaggcaacacagtgctggcaaatgctccgtttgcataatagaagattagggtggggcagccaggtttctcatgcactctgtaaatgtccacacctgatccaaccaatctttgagccctatgtaaattagacactgcctcctgaagccagtctgtaaaatccgctgtgcttcactgagggctggaagtcccacttgggtgccccactctttttcaggagattcaggagagagagctattctcctttcttttgcctattaaacctccaatcctaaaccaacttcttgtgtgtccatctactcgatttccttgacatgagatgatgtatctcaggtatttaccccagacaagtgaccctgcttcattatgttaaaactaattaatttattagttaaaattgctatattaagaaatatagcacattttaaaggccactgatgcaaagtgcaaaaactgctacgtacaaacatgacatcaaattatacttccagtaacagtgttagaaaattcttgtttccctacacttaccatttatgaatagtttaatggaacatgttatttaaaaaaatatttcccaggctgggtgcgatgcctcacacctgtaatcccagcagtttgggaggctgtggtgggcgaatcacctgatgtcaggagttcgagaccagcctgagcaacatggagaaagcccgtctctactaaaaatacaaaattagccagcgtggtggcacatgcctgtaatcccagcaacccaggatgcttagttaggagaatcacttgaaactggaaggtggaggttgcggtcagctgagctcacaccattgcactccagcctgggcaacaataacaaagttccgtctcaaaaaaaaaaaattgaattgcttagtcatgtcttctgcttattttgctattgaattatttaactttttactgattcatataagcttttggcatgcccattacagtaatcgtttgtccaaaattattttacacatatctccattcagctcccagtgtccaggttcaatatttttgaaagaaaaggagtccctgctttgtaaatatgcctactctttaaagagtttaaatactaattagtaaaaccctgttagggaagattaaacattgtctaattgaatttgatttgtggaaaataaatatctaacttttccattatgatttaaccatgtttacgaaggcagcccatacattctgggctcaaaagtctcttaaaaaagggaaaatgtattctatcaaagagggtaccagattccaagtttgcattgcactttgctgaacacattgtcttttttcaagcttaaactttttgaaaggttaccagtgttctctctgaaaacacagagctgctcatattacagccctgctgcaaaacatttgatggctcataacaccctacagagctgagcccccatcataattctaagcaatcattcatgtttccaacatctcttattgtctcatctccacacgaccctcccaaactatattcttttctcacactccacttgtcctaccctgtcatcaaataagcctcatatttttctacttcaaatcctgtacttaaactgctttttttggtttaaatgtatatttctcctttcccacattcttctactccacatggaaaagctgcacatgtgagagtatcaccttttctttccactgcagcttctcacttcccagttctccacttcttcttgctgattgtaaggcactggtgaattttagaactggaatcatattatatccatctttgcagttctagagcctggtaccaggtgtagatgtcaagaaatggttcccaatgcaagcttgctgatagtgatcttcaacagatgagacaagaaaggagccagaatgctagtctactaatccatattgctttccactattattttgctgaaactctcccaatgtcataagaaaaataacaatgaaaataataataatagtagtaaatacagaagataagtcagtgaaaattgagctggtagcatgcatgacttcaattctctatttattactagtttcaaaatagtccttatccacaaatagaagaaaacagacccttaagtgtctaccacaatgcaagacctgccaatttcataacttgctcaggcacacttataaaagaaactagacacactggtgaccccatctcaaacacactcaaaggagacagaagatcttcctctcactgtcctccagtacatgttgctcctcctgcttaaaaaagcaatacaacaaagaaataataccttccagaggctatcacatttgatcttggacaaatttttagattagtaatcaagtcaattcaactgttgcccttacttcactcatatcacatgttatgaaccacttcggatcaccccagtgcaaattctgaggcaaaaccttgattttctatgttatgtaaaataacaatagacctgtcctcaaggcattggccctacccaaagcaaaattaaatttcccaaacacttatgagtttacagtttcaaatctcttcaaaagtaggtttcatatgagtccttgaacagggttcagcactttcagtgagattaaagtgggtgtccacaagagataagagagcccccccactacccaccacacagaggaccaacagaattgtagaatccatgcccaccatttttcacttctagcatatctccccccatgtgaaagaccacctcccttccacatactatcctttccaatgagaacatgttaaaaatttcatccttggcagtattttttcagggttctactgtacttttccaccgggcctcagtctaccagcgttctgctttagtgtcttgttgaactccccctttttaagggcaaacaaatccccgtcagtcagttcacgtactaacatgacctctgcaagcccctcactccacaaaacaccaatctccattcctgaccatcacagaagggaaggtctaacttttgtggtcaaatattagctaaaatgagctgttgaatagctaggctgtaatttatttctggaaaccagaaccctgagttgacacacttatattcttcccttggtttgaccatcttttcccttgatgtgcctaatagggagaactctgcacacaggaggttttcagttagtgtttgtttggtgagcggatcatgtctctatggtaggtagtctggcaggggtaagaagcacagtcctttttcatgatattgattcttcctacccatgagcatggaatgttcttccatttctttgtatcctcttttatttcattgagcagtggtttgtagttctccttgaagaggtccttcacgtcccttgtaagttggattcctaggtattttattctctttgaagcaattgtgaatgggagttcactcgtgatttggctctctgtttgtctgttattggtgtataggaatgcttgtgatttttgtacattgattttgtatcctgagacattgctgaagttgcttatcagcttaaggagattttgggctgagacaatggggttttctagatatacaatcatgtcatctacaaacagggacaatttgacttcctcttttcctaattgaataccctttatttccttctcttgcctaattgccctggccagaacttccaacactatgttgaataggagtggtgagagagggcatccctgtcttgtgccagttttcaaagggaatgcttccagtttttgcccattcagtatgatattggctgtgggtttgtcatagatagctcttattattttgagatacatcccatcaatacctaatttattgagtgtttttagcatgaagggttgttgaatttttcaaaggccttttctgcatctattgagataatcatgtggtttttgtctttggttctgtttatatgctgggttacatttattgcatttattgatttgcatatattgaaccagccttgaatcccaggtgcacatgtaccctaaaacttaaagtataagaataaaaaaaaaaacagtcctggggacaaacttaacagtttgagttctaatagctggctgcctctctgggtctctattccctcatcttaatcttcaggataataattacatctacatctctttttctttctttctttcttttttttttttttgtttgtttttttgagatggagttttgctctgttgtcaggctggagtgcaatggcacaaacttggttcactgcagcctccacctcccaatgaataaaaaagataatgtgtaaaaaataattaggatcctggtagctagtgctcaataactgttagatcttaagacttctgcttctactgctatcatgatgagtgtgtttggcttaacaggtctagcgcaggtagaagagaaatagaaacacttaacccctggtttatctgatttaatgcaaatacaagcaaacttggctaagaaatgcttttcaccaaagtttgtctgcaatttgaatgctttagattaaacttagaagagtatttaaaagtattctagacaggccaacagcagtggcacccacctgtaatctcagcacattgggaggctaaggagggtggatcacctaaggtcaagagttcaagaccagcctggccaacatggtgaaaccctatctctgctacaaatacaacaattagccaggcatcgtgataggcacctataatcccagctagtggggaggctgaggcaagagaatcgcttgaactcaggaggtgggtgttgcagtgagctaagatcacaccactgtactccagtctgggagacaagagtgagattccaactcaaaaaaaaaaaaaaaaaaaaggcactctagacagattcatttgtaatataagcatgtcatagtttctggtgtataggacttgatttctgtttatttagttttctgaagaaacacaagagacagcccctagctactacaaaacttcctagagacaagctggacatatgagcccttacaaaattccatttactgtaaagataataatgaaataatctctaaacataagaatttgactagtgttaaccactccacttccccaatacactgatgtttatatctctttcttatcataatacaaaacaaacacatgaccacacaccatctgctctccagtgcagaacagaataacagaggcacaaagcaagcttcagaacacacagaccaccatgttcaccacatctacatctggggctgcttaagaaaaggagcaaaatcaatgagaaactgagaagatgtgtgactaccctgttttcagcacttattgtcacaagaagaccgaacatgcacacacactctctcattccaaggcagagcatccattttcctgtcgaaaaagtaatttgacagcatagatccctatctcacattctgagcaagatgacactggctttgggcatgcaaagaatgggcatattacagacacccttaagacacaacgcatggcctgccttacctgatacaatttttaatttctctgaagtaaactcaaattacttcttaagtaaactcaaatttcaaacatgtatttctttattaacattccattaatttcctcatgggcttcacaggaaatatattctactttcattcacttaatctcaccataatagatggtctaaaatatccagaagacagccatatgtaacacatacccataccccaaagcatagaaaatgtaacacacaaaggccttgaggaagcaacactataacagtgcaaatacacaaatatttaaggaagaatacatcacccaacagacagcatacatggtcaccactatccaggactctccataataagtagctatgaattgcttattctaaagttggcttatatatattcatcaccacaaattagttctgaacatactgattttaattttggatattcacaaggtaattatctggtaaaatatatttataactaatttgtaattagactactaaatgcacgcatatgcttaggtcacagtgaggcaaaaatctgagttatttgtagagtaaattaagatttaaatttttaaatattaattaatttttaaattttcaaagaatgctgtcatgcaggcctgcactaagtcaagcagatgactgacaaccaccctcttctccctgtctcctttacacaataaatgtgaagggctctagaagctcaggcccttcttcaccagaagcaaggagccctctgacctattcttccaaacatactcttttgtctttgtctttattcctgcatttatcctcctttgttcagtccaccagggtcagtggcaaagtggtgtcatgaatagggacttcgaggaagtgaacgaggaagatctgctggagcacaggaagtgaaatagacaagatgaatggggaccccaggacaaatatgctggcagtggatataaggtcagtgctctaaaaaagtactgggaatgggaagtttctgaatgacggtaccatggggcagcatttgtctgttgaagaaaaacattatgtgcagttgcctaaagttgtgttgaaacagtctggatctcaagttaattcacagacattagctaaacttctgcaggaggttattacacataacccattgtttccacaggcaggccctcttgatgtggaaaattgggacacagtaggagagggattgaaatgggctcatcaaaaagtctcaaagtagacccttctgttttttctgcttggggtttggttcgcatggtcctactgctgctgtctctttattctgccaggcaacagaagtcagtttctgagtctcaagaattaaaaaactcatttgttcctccaacagtgcatattgaaaataatgagcaggagaaagggggagaattggccatttgctaagcagaaaaaaagagaggagaattggcctctgccaccccctccaataacagaagtagaaacccccacacaacaaattttgcatgctgctgctatggcaagggaacttttgggaccttatgcttttcctattaccataaggcttgatctgaatgatccaccacatttttgacatgaacacactcttgtagagtttaaattactaaaagaattaaaaactggtgtggttaataatggagtgcaaagcccattcactatagggctgttagaatcggtgttcagagccatgtgccttccaccttttgatgaaaaacctttggcttgcacttgcttatccaccagtgcatatctgacatggagtttaaattggcaagaaatgtgtgcagaccaggctaggcagaatcgcaccgctcttcaaggaaacactacagaggaaatgttgatgagctgtggccccttttcagatctggtacaacaattaacactcccatcagagaggccacttaccaccagtcttccttagccaccaagcatgtttggagcacaattcctgaagagggagttacagtgcagtcttttctacatgtcacacagggatcacaggagccttatgcacaatttatcgcatggctgcaagatgcagtgcagcatcagatcactcatgcctctgctgcagaaatgcttaccatagctctagcctatgaaatgcaaatgcagattgcaagcatgctcaagcaatggctagtttaatagttgacaaatctaaaaggagccaaggatcaaaccctaaagtgggagaatgttataattatggaaaaactggacattttaaaaaggaatgccaccccagacctcaggacaaaaaggatcttacaatgtggtgcccccccccgcccagtggaaataatgccaggactctgtcctctctgtaacaaaggaaatcattgggctcaccgatgccactcaaaatttcatcacaatagcaccccctgtcaggaaatgagaaggaggcctggacccaggcccctcaagccatgagggcattcccagttcagaccacaaccccacttcaggggtgggtcccaggaggaatattgattgattccctctccccaggaacaccaggaagtgcaggattagatatccccaccagagatagaattacattagttggagaagacaaaccttccaaagttcccactggcatttggggacatttgccagcagaatacatgggactaattttaggcaaaagctgccttaacttgcaaggcatcactgtagtccccagagtagttgactctggttaaggagaaattcaaatagttttaatgtcaaaagatctttgtgtttttgaaccaggggaatatatagcacaattattgcttatcccctgcaaattacacccttctgcatgaaaggagaaatgaggaaataaagggtttgggagcacaactacatgcaaaatctatctattccaacccttagcctctaatagacccacctgtttggtacaaattaaaaaaaaatgtatgggcttatggacacaggagctgatgtgtcagtaatatccagtaaggattgacccccatcctggcccctcagactaatctccacatccctagtgggagtaggagcagctcaaagtgttcaacggagtgctgagattttaccttgtcttggtccggatggacaatcatgtactttccagccttatgttgcaaatatagctatcaatttatggggtcgagacttacttatagcattggatatgagacttacaaatgaaaactttaataacctaggatttaaaatgtcaaaggacatggaatatcagagtgggaaaggtttaggaaaattcctacaaggaaaccctaacccaatatcaataactggaaagacagacaaaaaagactggggccgggtgcggtggctcacgcctgtaatcccagcactttgggaggcagaggcgggtggatcatgaggtcaggagatcgagaccatcctggctaacacagtgaaaccccacctctactaaaaatacaaaaaattagccgggcgtggtggcgggcgcctgtagtcccagctactcggaaggctgaggcaggagaatggcgtgaacccgggaggcagagcttgcagtgagcagagattgcgccactgcactccagcctgggcgacagagcgagactccgtctcaaaaaaaaaaaaaaaaaaaggattgggacatcaggatttattattggggtcattgatacttttccaccacccactgccttacctttagaatggcttagtgacaaacctgtgtgggtggatcaatggcccctaacacaggagaagctagctcaacttcatctgttggtgaaagaataattggatgcaggacatttagaggagtcagttcccggaattcaccgatgtttgttatcctaaaaatagtccagaagatggcgactgctgcatgacttgagagctattagtgcacaaattaaaccaatgggtgcattacagcagggcttgccatccccagcagccattcctaaaaactggcctcttgtagtaatagatcttaaagattttttctttactataccattacatgagaaggataagcctcgatttgccttctctgtgccttctattaatcagagacatgctacaagccaaatgggtgagacatccggtcatgtatggtgacactgtctgtcgccgtttgctcatatggagatttctaaacaattaaaaactgacaatagacctgcttatactagtcatgcttttcaaactttcctacagctttgggctatgacccataaaacaggaattccttacattatagaccaggcacatcaaacgttacaacgcatgttgagaaaacaaaaaaaaagggtgattggacaccagccaccacctcaaacaaaactaagtttatctttatttactttaaattttttgactccttgtatgaatggtaagactgcagcagaaagacattggcaagtgttagaggaaattaggaaagtttatctgaaattattatggaaatccctggaagaaggacaatggaaaggtatggtggatttactgctgtggggacaagggtatgcttatgtttttacagcagatggataaaccatgtgggtgccctcaaggtgcgtgcaaccatggaatggaagactggaggaacccatggtggccaaccatgggcccggtccctctggtatgggccatgagccagctgagcctgagtgcaaaaatggacagaaggccaactggagtcatggtgacatcaacccctataacctgggggacactcaagaaaaccatgcaggaagctgagaaactactggagcgtcaaggccagaaaaaacccctgattccatgttcttggccatgttagctataatgccctgtgtggtaggttttcccttgcagagtcaaaaacatattgggcataggttcccaatcctccagcagtacaacctgtactttggagtgacactcctcctgagatctatcgtgatcagggagcatgggctccaggacccctatgtctggctcccccggacatagaacagttagactctcagaacaatgtcgtcaattatactaccccactggaaggactccccttgtgtatcactacaaagatgtcgctcaaccatagctgtcttacaactgaagctcaagcatggttgagtcaccttggaaaagttatgtacttaatagttcttggttctatttatgtaactggtgtgctaaccaaccatgcccggcccaattgccccaactgtgctgactatatggaatggattcccttcaatagttctgacctctctccattgacccagtgtcttggcccactgggtagaaaagaatctgtgttaactggagacattgtggattggggaactaaaggtcaactagatggaaaagaggaaaatcagaaatcatgacacaaacttcactgccattggtggcaagctttgaatactccttctttataccacaccgggatccaatcccagtctgccacctggattgcttggcatggagcaggctttagcacacctcttcctcagtggcattatctagggaggaaaggtccaattcaagaaacaatatggaaagcagcactgctgttcacaaacggtagtatccgggtaggaacactctctaataccagtactgctactcaacacagtcttaatgtcacatttgtaaagaatatcaccactcaacttatggtttgtggttttaatccttatgtctttttggcagctaaggcggaccagctccaggtaagcaatactcaattgaccttaaatcttgctggttatatcactgcattaatcatagcacattgcaaacatgtaatatctctactttgatatttgggtcacattcctgggctatggattctcattaatctgtctgagccttgtgatgccacccctgtttggcactttgtgaaacttcttctaactaaacttactcatcatgcctgtagagcctcaggcatcataatttttgctattgtttctttggtcacactaatcacttctgctgtaatgtcctctgtagctttgcatagttctgttcaaatggctcagtatgtagaggactggaggcatgcagccaactaagcatggctacttcagagtaaaattaacactgagttacaaactgaagtggtaatattaaaatccatggttctgtggttaggggaacaagtacaaagcttacagttgcaacagaaattgcactgtcattcacactcatatttgtgtaaccaacttagaatataaccaaagagtatccatgggaccttgtaaaagcccatttgcagggagctttcacatccaacatcacctttgacattggtgaattacaaaaaaaagttcttgatttaaataagcaaactcaagagtttcagccttctttagaagcctggactgaattccagcaaggcctggagagcctcaatccttggaactatctaaagtaccacattaacatctcatatatagttctgggaataatgttgttctgtctctgtttcctgctcatagcctgtaaaatcagatggattgccaatcagaaaataaagctgcccaacctggccttacattcattcaattaatgcaaaaacagaaagggagagatgttgggatccagaagcctgaggattgtgaccaacacagcattccactggaagctatatgatcaaagagcaaactgtttatcatgaatgcagaatgtgggcaaactcacatctgcacctgacactggaaggtatgctaaggggagccactccctggtgctgtgctccttgagattatctactgggacatctggagcctactgtttaaagaatgctgtcatgcaggcctacactaagtcaagcagctgactgacaatcagccccttctccctatctcctttactcaataaatataaagggctctagaactcagggcccttgttcactagaagcaaggagccccctgaccccttcttccaaataaacttttttgtctttgtctttattcccacattcatcttcctttattcaggccaccagtgtacatggcaaagtaatcaaaatacagtagtcagtgagcaccaaccatgcaattgtgctaggtaaggagatggaaaaaatatttttgaggtgggagaaacatcctaacagataaattacagcagacagacttgacagatgggggtaacagttattaggaacaaaagactgaattctccctagaaaaggtagtatctgagatgggtcttaccagaggagtaaatgttctttgctggggtaaggggatggacacacaacaaaaagaacaacccatgcaacagcacagggagtaaataattattcagtgtggcactgatgtggaaggtagagacaagagccaacactagaaatttggcttgtctcagcacttcgggaggctgatgtgggcagatcatgaggtcaggagtccgagaccctcctggccaacatggcaaaaccacatctctactaaaaatacaaaaattagctgggcgtggttgcatgtgtctgtaatcccagctactccagaggctgaggcaggagaattgcttaaacccaaaaggtggaggttgcagtgagacgagattgtgccattgcacttcagcctgggtgacagagaaagactccgtctcaaaaaaaaaaaaaaaaaaaagagaaaagaaatttggtttggaagcagatgacggtctttgtaaaacaagttaaggagtttggatttttctttttgtagacaacagggagccaagaaatattattaggcaggcaaacaactagagaagctttagtttttgaggatgatgactctgacagcagggtggaaaattaacagcagcagggagaaattagtggcagaaaattaacttaagaggtgtttatgactcaatgatggccttaggtcagaagtgattaaacagccaaagtcagtgactggagcatggttttgggggagagcctggtgactgattggacatgggggtgagagagacatgcatcaggacagccatcagtaatgttcctggcctagtaggttgtgtacattgcaatcatcttccagaagggatggagattactttcattattacaagtacctacaggatgagggatttgtagtatgatcaggatgacaaagagtacagcttcagataagttgtaagtgaaaatatagtgttagagttgccagtttataggttagaggagaggtaagaaaagcacaagaatgcacaggtcattctgcaagaacaaaactcactcccaggtatgggactgcaaaggtcgctgcagagaacaggcattgggtaactggcaactgacaccaatggaatgcttacagtctgtccacagatttaagatttttaaaacaactattctcaagtgttgcaaatgtctctaaggtaagtgggggcccagagcactttgggggcaactgtctgcttactgcaggcagccctttcttatctggaattcagtctcctcatcttcctgccttctcccttgcatatctcctgcttgtgtaatagggtggaaagtgggagggcaggacaaaggtcagaccaatagcactggttagctaaaagatcactcctttcattctactagacagttctggtctgaggcctgggatcccagaacataaaattattactctgtcctttattgcatccctgtattatccccatttccctcagccagagcatctggctgacatccaccctctcaagaggacatgtaggacagaagaccaggctcagaaaaactgctgtttgaaaagggcaggtagttaagtaagaattttggaagaacttgagaaattaaaattacggagactatgaatgcaaaaacactaactgtcaagcaagtaagagctaatttaaagaacttttttaaaagatatagtccacataacttgaaacatgcggaagactggcagatgactgcatcagagcgaatttcctaaataactgaggaggtgactgggaaaactgagccacctaccaaaacagctttacagagccaatgcatctcaattgttgtaaaagaagatgagttctagaactcttatttactatggagttttcaaatacattgaacatcacttaatgttttcctcaatcccaagcttcttgtaaaactttgaccttgccaaccatggcaccttagaggcagatgaaagcttacctattttatggaatttcagatttctaaatatagcacatgcaatacagggaatgcacccagtgtgcttgtggatgcaataatgaccactactacacctctcaagcaggctttgttgacttcagctctcctgacatttggggctgtcctatgcattgtaatatgtggagcagcatttctagtgtctgtacactaaaggccagtagcaccctttcccaaagcaagacactaaaaatttcaaaattctggaaaggaaatccacagtagacacccacaaagcttcctgatctcaaaatataccactttattccatatgtaggttttgagtttctgaaacatttgctttatgcttacaacaatcccatgaggtagaaaagctactgacaagatgcctgtcatcatattcatcaatggcaatgccaccaaaagctaaagtttcattttaaattcccttataccttcaaatcaactgaatttattttgaaaaaaaataatggtcttctttattaaaaataacagcacacatatacagaggtaaataagcagtatacatttaaaactacattgttttgagatcaagctgactgtataaagcagctgttccatggggctaagcaataggaactgtggatcctgagcttaatgtattgccagcccctgggtagatcataaagcatctataacagtagtcaatatgcccacccaaccctaatagttttgctctgagtagaaatgtgaaatctttgctgagtgctttcaaaaaacagggtgaaaataacttagtccaaaaaggtacaccaaaataaacaaggaatattttaaagtaattaaaccaccagaaatatcagacattttctataatcctaccccattgtctctgagaaaagggaaaaagaaaatacaaagcaagctatccaaagacaaatacagcttttaaaagctctatctaattaaccccaccaaaaatttttttggctacctagtatatgcaggctctgcacaatgtgggacagtggtccccaacctttttggcaccagtgtctggttttgtggaagacaatcttcccacagatgtggtgggatagttttcatttgggatgattcaagcacattacacttactgtgcactttgtttctcttatgattacattgtaatagataatgaaataattatataactcaccatattgtagaatcagtgagagcactgggattgatttcctgcaactaaatgttcccatctgggggtgatgagaggcagtgacagatcctaaggcattagattctcataaatagtgtacagcctacatccctcacatgcacagttcacaatagcagttgcactcctatgataatctaatgctgctgctgatcggtaatgcaagtgatggggagtggccatgaatactgatgaagctttgctaacccaccattcacctcctgctgtacagcctggtttgtaacaggacagactggtatcagtctgtgctctggtgttgaggacccctgacgcagggcaactacatttatttatttatttatttatttagtgcaatggtgcaatctcagctcactgcaaacttcacctcctggtttcaagcaattgtccagcctcaaccttccaaaatagctggaattacagacacatgacaccacgtcctgttaattttgtatttttagcagaggtggagtttcaccatgttggtcaggctggtctcaaactcaggatctcaggttattcacccacctcagcctcctaaagtgctgggattacaggcatgagccactgtgttcttctgacaactacatttattaccagccatttattaccaggacacctatgttgtgcagtgcctggcatacaccaggtacttaataaacagctattgatctaatgcaggactaataaggtaaggtgtattttttctccttctacatgctgtgcctgtgtcagatgcaaataagacctcaggagtctgcctgaagagacttaaaataaaactctttcatcaagcagtcacttggatggtgtaacaagttacatatgaatgtgtcacctgtaacagcttagtgacatgcatgtttaccatcacataacaaacacatgtctgccatgctcagggcttagagtctgaatttctaatgagaaataaagtggtacctagaaaaccccagaaatgatactccatatatccataagcatcagtagcatttccaaaaattgtcccacatccaacaaatcctttaaaaacaagatatgctaacatgcatccagtttagcggaatttctaaaaatgataaacagtgcaacttcaaacacctgaaatggagcacaagacccttttgaaggaattcatatccattcctgcaaaagttctgtggactcttgaaggtagcacagaactaagcattttttgtgtgtttccaaaaggttttagcctagcctttggcctctaacagactctctgattaaaatatggcttagaaactctacctgcctacttgaaaaagcatcaaatctggagaatgcttttcacgggtgtgaaaaaatgaaaacaaaatcacattcttctctttgcaattccctttcccccaccttccacttctattaaatatacttcagcatcattgtgcataggtgcagggaccattacatatctaaaaaaggaaaaaaccctcaaatatatggggatgcactggcaactttgcctttgcagaaatcattttgtttccaccagacagaagcgtctcactattttcagcattctcatctaacaggcaaattttgtttttattgactttgaaaggggtaagcttaaatctaaactcttaaacaagaaccagggttcaattttctgttaatgaaattcccagacaggtttttcaacctaccaaatcattatagtttttattcacccttctctctctcttcacaaccactaacatcaccacccacaaaagaagaagacaatccctccaatgttccccaaacgtgtgctgctgctagctcagaagttgtgtagagttttgtaattgagtgtgaaccgctggcctggatctgggctcgtgaatcacatgctcgatgcgcctctgcccagaaaatgcgctgcttcccagggaaagcgtcggctatgggaaggacctcccctgctccttagcaaacattagggtcgcagtttcctaagagacacgagtgggaaatgggggagtattggagaccagcctcaacaccacctgtggggtacctgaagtccggtggtgacgaagtaatgagaagagacaagagtgcaaaaggatgggggccagggggccagtgcaattcagaggctgcaaaggcgctgatctctggcctccacactatttattgagtacaatcacttagatctaagaagcagatgttcaggggtgaaatggtgaaagggaggtggtgtgtcacacacctaatctatagcagtggcggtttaggtaaattttctttgtgctgaagcagcataaacttaactactgatttattctttaacttatcggagagcagctgtggggggtgggcctaactaggaactagcaagtatggccacattccaatgcttcaaaggagtgtctttctccttgagcacagtgtttatagataagagagcaggtcacgctcttgtcatgggaacatgatggtaataaagaggctttcctcctcagaggcctcctgtggctttccacaacttatagtcccatatttttatggccagtttatacaggcactccataagcctttttcccagcaggggagggggcccaggcagaggctggtgctggggttagagaaagctacactaggtgtctggctggtgtgggagcaggaagggaagccccagaacaagccacaaattgttccagcaggagtaggccccctgcctttttcctggactaacgacggcacccggcactgagcccctcacttctgcaaggaagtgctctccacaccgacggtccttgtgaaacacgcaccccactgatggaagggtgaggaatgataggcgccccatggccaggccgtggcccccttctttcctgggcgccttaggtggtagtcagccacaccacaactgccagccaggaaagggtaagggcgtagggctgcctgctgccccctcagtgccagtgtcctctgcccagaaaggtcaaatcggcagagcagggtgcggaaagcaccctggtgagaacaccctggtgagaacaccccaggaggccaactcctggccggcacccacgatgctttctggctgcagaggaaagcaggatccctagtttccaggcttccctgccagagagagactggaaagaccatagaaggaaagtttctcctttcacagggggaaggatacagggagacagcgcagaagttggagagcagcatcgaaatgtttctggcctatgtggcttgcaccatccgattcccggcagtgttataacagataaattcatcccagtattccgggaggccaaggagggcagaacacatgtgcgcggaagtttcagaccagcctgggcagcatggtgagatccaatcactacaaaaatagttaatcaggtgtggtgggccacgcctgtattcccagctactcgggaggctgaggtgagagaatctcttgaggctacagttagtcataagcttgtgccactgcactccaggctgggtgacagagtaagaccctttctcatagaataaataaataaataaataaataaataaataaataaacatataaataaactcggccgcctgggttgggccggattcttagcttccaaaagctaatattgacgcacttcaggtcttgctagcacagcgctgcagagactgccacaaagtgtgctgggtgctgcttgttgttgccagtggctaggtaagaggcggagtaagaatgtaggagtggagaaaaaggaggagaaaaagagaagagtagaagagaaggagaggtgggaaaggaggagagataaagggaggaggaagtgagagaagaagagaagaaaaaatgcgaagaagatagaagagagaaagtggtgaaaaaaccggaagggaacaatgggactagaagagaagaggagaaaaaacctggaagaaggagtagagcaggagaaaaagagaaggaggaggaggagaggaaaaggagaaaggtgaggagaagaaggaggacgaggagaagaggagaagaaaataggaggaggagaggcgagaaagagcaggagaggaggaggagaggagaaggaggaggaagcaaagtagagtataagaggagaaaagggggaggagaagagatgaatgaggagagaaggaggaggaggagtaaggaaaagtagaagaaaaaaggagaagaggaggagaggaaaaggagtaagagaaagcaaagagaaaaagaaggaagagaggaggaaaaggaggaaaagaaaatgaggaagagtagaggcagaaaaggaaaagcaaaaggaggaggagaggagaaaaaggaggatagaaggaaaaggaggaaaaagaaaaaaggaggagaagaggggacagaggagaaggaggaggaggaagagaagagaaaaaagaggagaggaggagaaggaagaggagaggaggagaaggaagaagagaggaggaatggagaaaggaggaggagagaagaagaaggtgaaggggatgagagaagaagaaaaaggaggaagaggaggaaaaatgaaggaggagaaggtagaggataaaaaggaggagtaggagtggagaagaaggaagacaaaaaaaggaggtggaaaagaaggattagaagaggagaaggaggagaaggaaaaagaggaggaaaggaggaagaggtggagagaaagagaaagcagggaggaggatgcggtggactaggacgtggaggagaggagaaggaggagaggaggaggagagataaagaaggaatagtaggaggagagaaaaaggaggaaaagaggagagataaagaaggaatagtaggaggagagaaaaaggaggagagaaggagaggagatggaggaggaggagaggagtaaaaagagaaggagaggaaaagaaggagaagagaagaaggagcataggaggaggaggaggagaggaggtggaggaggacaaaaaagcaaaaggtgaggagaaggagggggagagaaaaaggaggagaggaaggagaaagagaaggaggccaggagaaaaaggagagggaggtggggaaaaggaggagaaaaggagaaggagaaggatagaaggaggagaagaagaaaaggaaaggagaaggaagagagaaaggagaaaaagaaaaaagaaaaaattagaagaagaaggaggaaagaacaagaaggaggagaggaaaaggaggagaaagtggataagagaaggggagtggaaagaaaaaaggaggagaggaggtgggggaggagaaaaaacgaggaggaagaagaaggaggggaaggaaaataggtggagaaggaggaggaagagaagaaggagagcaggagaagaggaagagaagggggaggagaggagaagaaggaggaggactagagaagacgtaggagagaaggacttggagaagaggaggaaaggaaaaagagaagaaggagaggaggaagagaagaagggaaaggaggagggcgaggagaaggaaaggagtaggtaacaaagagaaggagagaagaagaaaagtaggagaaaagaaaatggagaaaggagaataaggaggacaggagggaaagagaagaaggaggagggaaagaagaagcggaggatagaaggagtacttagagaggaggaaaaggtggaggaggatagcagaaggaagagaaaaaggagaaagaaaggaggagggggtggagagaagaaagaatagaggagaaggaggaggagaagaggaggcagaggagggggaagaaggagaagaggaggaggagcagaggaggaggaaaagaggagaaggaggagtagacaagcaggagaagagaaagaagaagaagcagaggagagaaggagaggaggaggagaggtggaggaggaaaaaagaagtagaggaggaggagaggaggaggaaaggaggagagaagggggagaggaggagaaggaaaagggaaggagacaggagaagaaggacagggggagaggaggagaaaaaggagaggaggaggacaggaggagaaggaggacaggaaaggaggaggaagaggagtggaggagaggataaaaagaaggtggaggaaaagaggaggaggaaaaggaggtgaggagaaggaaaaggagagaaggaagaggaggagtagagaaggaggacaaggaggagcagaaaagagaaaggaagaggagaaggagagaaggaagagaattagagaagaaggagaaggagaggagaaagaggatgaaaggagaaggaaaaggaggaagaggagaaaacaaggagaagggggagaagaaaatacataggagaagaaagaggaaaagaaggagaggagaagtaagaggagaggaggaggatgagaggaggaatggagcaggaggagtagaggaggagaagaggagaaaaaggagaaaagcagagaataaggaggaggagcagaagcagaggagagagaaaagtaagagatggagaagatgaggagcaggaagaggaggtggaggaggaataaaaggaggagtaggagaaaaggagaaagagttggaaaaggagaggagaagaaggaagagaaaaaagagaaggaggagaggagaaggaaaggagaagaagaaaaaggaggaagagaggaggaaaggaggagtagggggagaggaggagaaagaggggaggaggaggtggatgagagaagaaagaagaaaggaaggagaggaggagaggaaaagtaa
